(19) United States
(12) Patent Application Publication
(10) Pub. No.: US 2018/0119123 A1
(43) Pub. Date: May 3, 2018

(54) CRISPR/CAS-RELATED METHODS AND COMPOSITIONS FOR TREATING HIV INFECTION AND AIDS

(71) Applicant: EDITAS MEDICINE, INC., Cambridge, MA (US)

(72) Inventors: Jennifer Leah Gori, Jamaica Plain, MA (US); G. Grant Welstead, Cambridge, MA (US); Penrose Odonnell, Yarmouth, ME (US)

(73) Assignee: EDITAS MEDICINE, INC., Cambridge, MA (US)

(21) Appl. No.: 15/809,549

(22) Filed: Nov. 10, 2017

Related U.S. Application Data
(63) Continuation of application No. PCT/US2016/031922, filed on May 11, 2016.
(60) Provisional application No. 62/159,778, filed on May 11, 2015.

(51) Int. Cl. C12N 9/22; A61K 38/46; C12N 15/113

(52) U.S. Cl. CPC C12N 9/22; A61K 48/00; C12N 15/1138; A61K 38/465

(57) ABSTRACT

CRISPR/CAS-related systems, compositions and methods for editing CCR5 and/or CXCR4 genes in human cells are described, as are cells and compositions including cells edited according to the same.

### CROSS-REFERENCES TO RELATED APPLICATIONS

[0001] This application is a Continuation of International Patent Application No. PCT/US16/031922, filed May 11, 2016, which claims priority to United States Provisional Application No. 62/159,778, filed May 11, 2015, the contents of each of which are hereby incorporated by reference in their entirety herein, and to each of which priority is claimed.

### SEQUENCE LISTING

[0002] The specification further incorporates by reference the Sequence Listing submitted herewith via EFS on Nov. 10, 2017. Pursuant to 37 C.F.R. § 1.52(e)(5), the Sequence Listing text file, identified as 084177.0122USSEQ.txt, is 1,723,075 bytes and was created on Nov. 10, 2017. The entire contents of the Sequence Listing are hereby incorporated by reference. The Sequence Listing does not extend beyond the scope of the specification and thus does not contain new matter.

### FIELD OF THE INVENTION

[0003] The disclosure relates to CRISPR/CAS-related methods, compositions and genome editing systems for editing of a target nucleic acid sequence, e.g., editing a CCR5 gene and/or a CXCR4 gene, and applications thereof in connection with Human Immunodeficiency Virus (HIV) infection and Acquired Immunodeficiency Syndrome (AIDS).

### BACKGROUND

[0004] Human Immunodeficiency Virus (HIV) is a virus that causes severe immunodeficiency. In the United States, more than 1 million people are infected with the virus. Worldwide, approximately 30-40 million people are infected.

[0005] HIV preferentially infects macrophages and CD4 T lymphocytes. It causes declining CD4 T cell counts, severe opportunistic infections and certain cancers, including Kaposi's sarcoma and Burkitt's lymphoma. Untreated HIV infection is a chronic, progressive disease that leads to acquired immunodeficiency syndrome (AIDS) and death in nearly all subjects.

[0006] HIV was untreatable and invariably led to death in all subjects until the late 1980's. Since then, antiretroviral therapy (ART) has dramatically slowed the course of HIV infection. Highly active antiretroviral therapy (HAART) is the use of three or more agents in combination to slow HIV. Treatment with HAART has significantly altered the life expectancy of those infected with HIV. A subject in the developed world who maintains their HAART regimen can expect to live into his or her 60's and possibly 70's. However, HAART regimens are associated with significant, long-term side effects. The dosing regimens are complex and associated with strict dietary requirements. Compliance rates with dosing can be lower than 50% in some populations in the United States. In addition, there are significant toxicities associated with HAART treatment, including diabetes, nausea, malaise and sleep disturbances. A subject who does not adhere to dosing requirements of HAART therapy may have a return of viral load in their blood and is at risk for progression of the disease and its associated complications.

[0007] HIV is a single-stranded RNA virus that preferentially infects CD4 T lymphocytes. The virus must bind to receptors and coreceptors on the surface of CD4 cells to enter and infect these cells. This binding and infection step is vital to the pathogenesis of HIV. The virus attaches to the CD4 receptor on the cell surface via its own surface glycoproteins, gp120 and gp41. Gp120 binds to a CD4 receptor and must also bind to another coreceptor in order for the virus to enter the host cell. In macrophage-(M-tropic) viruses, the coreceptor is CCR5, also referred to as the CCR5 receptor. CCR5 receptors are expressed by CD4 cells, T cells, gut-associated lymphoid tissue (GALT), macrophages, dendritic cells and microglia. HIV establishes initial infection most commonly via CCR5 co-receptors (M-tropic HIV). In thymic-(T-tropic) viruses, the virus uses CXCR4 as the primary co-receptor to infect T cells. CXCR4 is a chemokine receptor present on CD4 T cells, CD8 T cells, B cells, neutrophils and eosinophils, and hematopoietic stem cells (HSCs) that allows blood cells to migrate toward and bind to the chemokine SDF-1. In the later stages of infection, 50-60% of subjects have T-tropic viruses that infect T cells through CXCR4 receptors. Subjects may be infected with M-tropic viruses, T-tropic viruses, and/or dual tropic viruses (i.e., viruses that can utilize either CCR5 or CXCR4 co-receptor to gain entry into cells).

[0008] Most initial HIV infections and early stage HIV is due to entry and propogation of M-tropic virus. CCR5-Δ32 mutation (also refered to as CCR5 delta 32 mutation) results in the expression of a truncated CCR5 receptor that lacks an extracellular domain of the receptor, thus preventing M-tropic HIV-1 viral variants from entering the cell. Individuals carrying two copies of the CCR5-Δ32 allele are resistant to HIV infection and CCR5-Δ32 heterozyous carriers have slow progression of the disease.

[0009] CCR5 antagonists (e.g., maraviroc) exist and are used in the treatment of HIV. However, current CCR5 antagonists decrease HIV progression but cannot cure the disease. In addition, there are considerable risks of side effects of these CCR5 antagonists, including severe liver toxicity.

[0010] As HIV progresses to later stage, the virus often becomes predominantly T-tropic. In later stage HIV infections, many subjects have T-tropic viruses, which infect T cells via CXCR4 coreceptors. CXCR4 receptor tropism is associated with lower CD4 counts, and, often, later stage, more advanced disease progression. There is no known protective mutation in the CXCR4 gene that is equivalent to the CCR5-Δ32 mutation.

[0011] In spite of considerable advances in the treatment of HIV, there remain considerable needs for agents that could prevent, treat, and eliminate HIV infection or AIDS. Therapies that are free from significant toxicities and involve a single or multi-dose regimen (versus current daily dose regimen for the lifetime of a patient) would be superior to current HIV treatment. A reduction or elimination of CCR5, CXCR4, or both CCR5 and CXCR4 gene expression in myeloid and lymphoid cells can prevent HIV infection and progression, and can cure the disease.

### SUMMARY OF THE DISCLOSURE

[0012] The methods, genome editing systems, and compositions discussed herein, allow for the prevention and treatment of HIV infection and AIDS, by gene editing, e.g., using CRISPR-Cas9 mediated methods to alter a CCR5 gene. The CCR5 gene is also known as CKR5, CCR-5, CD195, CKR-5, CCCKR5, CMKBR5, IDDM22, or CC-CKR-5. In cetain embodiments, altering the C-C chemokine receptor type 5 (CCR5) gene comprises reducing or eliminating (1) CCR5 gene expression, (2) CCR5 protein function, and/or (3) the level of CCR5 protein. Altering the CCR5 gene can be achieved by one or more approaches described in Section 4. In certain embodiments, altering the CCR5 gene can be achieved by (1) introducing one or more mutations in the CCR5 gene, e.g., by introducing one or more protective mutations (such as a CCR5 delta 32 mutation), (2) knocking out the CCR5 gene and/or (3) knocking down the CCR5 gene.

[0013] The methods, genome editing systems, and compositions discussed herein, allow for the prevention and treatment of HIV infection and AIDS, by gene editing, e.g., using CRISPR-Cas9 mediated methods to alter a CXCR4 gene. The CXCR4 gene is also known as CD184, D2S201E, FB22, HM89, HSY3RR, LAP-3, LAP3, LCR1, LESTR, NPY3R, NPYR, NPYRL, NPYY3R, WHIM or WHIMS. In cetain embodiments, altering the CXCR4 gene comprises reducing or eliminating (1) CXCR4 gene expression, (2) CXCR4 protein function, (3) altering the amino acid sequence to prevent HIV interaction with the protein, and/or (4) the level of CXCR4 protein. Altering the CXCR4 gene can be achieved by one or more approaches described in Section 5. In certain embodiments, altering the CXCR4 gene can be achieved by (1) knocking out the CXCR4 gene, (2) knocking down the CXCR4 gene, and/or (3) introducing one or more mutations in the CXCR4 gene (e.g., introducing one or more single base or two base substitutions).

[0014] The methods, genome editing systems, and compositions discussed herein, allow for the prevention and treatment of HIV infection and AIDS, by gene editing, e.g., using CRISPR-Cas9 mediated methods to alter each of two genes: the gene for C-C chemokine receptor type 5 (CCR5) and the gene for chemokine (C-X-C motif) receptor 4 (CXCR4). Alteration of two or more genes (e.g., CCR5 and CRCX4) (e.g., in the same cell or cells or in different cells) is referred to herein as “multiplexing”. In certain embodiments, multiplexing comprises modification of at least two genes (e.g., CCR5 and CRCX4) in the same cell or cells.

[0015] The methods, genome editing systems, and compositions discussed herein, provide for prevention or reduction of HIV infection and/or prevention or reduction of the ability for HIV to enter host cells, e.g., in subjects who are already infected. Exemplary host cells for HIV include, but are not limited to, CD4 cells, CD8 cells, T cells, B cells, gut associated lymphatic tissue (GALT), macrophages, dendritic cells, myeloid progenitor cells, lymphoid progenitor cells, neutrophils, eosinophils, and microglia. Viral entry into the host cells requires interaction of the viral glycoproteins gp41 and gp120 with both the CD4 receptor and a co-receptor, e.g., CCR5, e.g., CXCR4. If a co-receptor, e.g., CCR5, e.g., CXCR4, is not present on the surface of the host cells, the virus cannot bind and enter the host cells. The progress of the disease is thus impeded. In certain embodiments, by altering the CCR5 gene, e.g., introducing one or more mutations in the CCR5 gene, e.g., by introducing one or more protective mutations (such as a CCR5 delta 32 mutation), knocking out the CCR5 gene, and/or knocking down the CCR5 gene, entry of the HIV virus into the host cells is reduced or prevented. In certain embodiments, by altering the CXCR4 gene, e.g., knocking out the CXCR4 gene, knocking down the CXCR4 gene, and/or introducing one or more mutations in the CXCR4 gene, entry of the HIV virus into the host cells is reduced or prevented. In certain embodiments, by multiplexing the alteration of both CCR5 and CXCR4, entry of the HIV virus into the host cells is reduced or prevented. Examplary multiplexing alterations of CCR5 and CXCR4 genes are described in Section 6. Examplary multiplexing alterations of CCR5 and CXCR4 genes include, but are not limited to: (1) introducing one or more mutations in the CCR5 gene, e.g., by introducing one or more protective mutations (such as a CCR5 delta 32 mutation), and knocking out the CXCR4 gene; (2) introducing one or more mutations in the CCR5 gene, e.g., by introducing one or more protective mutations (such as a CCR5 delta 32 mutation), and knocking down the CXCR4 gene; (3) knocking out both CCR5 and CXCR4 genes; (4) knocking down both CCR5 and CXCR4 genes; (5) knocking out the CCR5 gene and knocking down the CXCR4 gene; (6) knocking down the CCR5 gene and knocking out the CXCR4 gene; (7) introducing one or more mutations in the CCR5 gene, e.g., by introducing one or more protective mutations (such as a CCR5 delta 32 mutation), and introducing one or more mutations in the CXCR4 gene (e.g., introducing one or more single or two base substitutions); (8) knocking out the CCR5 gene and introducing one or more mutations in the CXCR4 gene (e.g., introducing one or more single or two base substitutions); and/or (9) knocking down the CCR5 gene and introducing one or more mutations in the CXCR4 gene (e.g., introducing one or more single or two base substitutions).

[0016] In certain embodiments, altering, e.g., introducing one or more mutations in the CCR5 gene, e.g., by introducing one or more protective mutations (such as a CCR5 delta 32 mutation), knocking out or knocking down the CCR5 gene in a subject's CD4 cells, T cells, gut associated lymphatic tissue (GALT), macrophages, dendritic cells, myeloid progenitor cells, lymphoid progenitor cells, microglia, or HSCs (i.e., the parent cells that give rise to the above indicated myeloid, lymphoid and microglial cells) can reduce or prevent M-tropic HIV virus particles from infection and propogation within host cells. In certain embodiments, altering, e.g., introducing one or more mutations in the CXCR4 gene (e.g., introducing one or more single or two base substitutions), knocking out or knocking down the CXCR4 gene in a subject's CD4 cells, CD8 T cells, B cells, neutrophils and eosinophils, or HSCs (i.e., the parent cells that give rise to the above indicated myeloid, lymphoid cells and microglia) can reduce or prevent T-tropic HIV virus particles from infection and propogation within host cells. In the later stages of HIV infection, subjects are often infected with both M-tropic and T-tropic viruses. In certain embodiments, the knockout or knockdown of CXCR4 in a subject's lymphoid and myeloid cells can reduce or prevent the drop in T-cells associated with later stage, often more severe HIV. In certain embodiments, altering both CCR5 and CXCR4 genes in a subject's CD4 cells and lymphoid and myeloid progenitor cells, and/or HSCs can reduce or prevent HIV infection and propagation within the host. In certain embodiments, knock-out or knock down of one or both of these receptors in the host can effectively render the host immune to HIV.

[0017] In certain embodiments, altering both CCR5 and CXCR4 genes in myeloid and lymphoid cells, and HSCs reduces or prevents HIV infection and/or treats HIV disease. In certain embodiments, both T-tropic and M-tropic viral entry into myeloid and lymphoid cells are prevented or reduced by altering both CCR5 and CXCR4 genes. In certain embodiments, a subject who has HIV and is treated with alteration of CCR5 and CXCR4 genes would be expected to clear HIV and effectively be cured. In certain embodiments, a subject who does not yet have HIV and is treated with altering both CCR5 and CXCR4 genes would be expected to be immune to HIV.

[0018] The methods, genome editing systems, and compositions discussed herein, provide for treating or delaying the onset or progression of HIV infection or AIDS by gene editing, e.g., using CRISPR-Cas9 mediated methods to alter a CCR5 gene. In certain embodiments, altering the CCR5 gene comprises reducing or eliminating (1) CCR5 gene expression, (2) CCR5 protein function, and/or (3) the level of CCR5 protein.

[0019] The methods, genome editing systems, and compositions discussed herein, provide for treating or delaying the onset or progression of HIV infection or AIDS by gene editing, e.g., using CRISPR-Cas9 mediated methods to alter a CXCR4 gene. In certain embodiments, altering the CXCR4 gene comprises reducing or eliminating (1) CXCR4 gene expression, (2) CXCR4 protein function, and/or (3) the level of CXCR4 protein.

[0020] The methods, genome editing systems, and compositions discussed herein, provide for treating or delaying the onset or progression of HIV infection or AIDS by gene editing, e.g., using CRISPR-Cas9 mediated methods to alter two genes in a single cell or cells, e.g., a CCR5 gene and a CXCR4 gene. In certain embodiments, altering the CCR5 gene and the CXCR4 gene comprises reducing or eliminating (1) CCR5 and CXCR4 gene expression, (2) CCR5 and CXCR4 protein function, and/or (3) levels of CCR5 and CXCR4 protein.

[0021] The presently disclosed subject matter provides for genome editing systems comprising a first gRNA molecule comprising a first targeting domain that is complementary with a target sequence of a CCR5 gene and a second gRNA molecule comprising a second targeting domain that is complementary with a target sequence of a CXCR4 gene.

[0022] In certain embodiments, the first targeting domain comprises a nucleotide sequence selected from SEQ ID NOS: 476 to 1569 and 1947 to 3663, and the second targeting domain comprises a nucleotide sequence selected from SEQ ID NOS: 4064 to 5208, and 5921 to 8355.

[0023] In certain embodiments, the first targeting domain comprises a nucleotide sequence selected from SEQ ID NOS: 208 to 475, and 1614 to 1946, and the second targeting domain comprises a nucleotide sequence selected from SEQ ID NOS: 3740 to 4063, and 5241 to 5920.

[0024] In certain embodiments, the first targeting domain comprises a nucleotide sequence selected from SEQ ID NOS: 476 to 1569 and 1947 to 3663, and the second targeting domain comprises a nucleotide sequence selected from SEQ ID NOS: 3740 to 4063, and 5241 to 5920.

[0025] In certain embodiments, the first targeting domain comprises a nucleotide sequence selected from SEQ ID NOS: 208 to 475, and 1614 to 1946, and the second targeting domain comprises a nucleotide sequence selected from SEQ ID NOS: 4064 to 5208, and 5921 to 8355.

[0026] In certain embodiments, the first targeting domain comprises a nucleotide sequence selected from SEQ ID NOS: 335, 480, 482, 486, 488, 490, 492, 512, 521, 535, 1000, and 1002, and the second targeting domain comprises a nucleotide sequence selected from SEQ ID NO: 3973, 4118, and 4604. In certain embodiments, the first targeting domain and the second targeting domain are selected from the group consisting of:

[0027] (a) a first targeting domain comprising the nucleotide sequence set forth in SEQ ID NO: 335, and a second targeting domain comprising the nucleotide sequence set forth in SEQ ID NO: 3973;

[0028] (b) a first targeting domain comprising the nucleotide sequence set forth in SEQ ID NO: 335, and a second targeting domain comprising the nucleotide sequence set forth in SEQ ID NO: 4604;

[0029] (c) a first targeting domain comprising the nucleotide sequence set forth in SEQ ID NO: 488, and a second targeting domain comprising the nucleotide sequence set forth in SEQ ID NO: 4604; and

[0030] (d) a first targeting domain comprising the nucleotide sequence set forth in SEQ ID NO: 480, and a second targeting domain comprising the nucleotide sequence set forth in SEQ ID NO: 4118.

[0031] In certain embodiments, one or both of the first and second gRNA molecules are modified at its 5′ end. In certain embodiments, the modification comprises an inclusion of a 5′ cap. In certain embodiments, the 5′ cap comprises a 3′-O-Me-m⁷ G(5′)ppp(5′)G anti reverse cap analog (ARCA). In certain embodiments, one or both of the first and second gRNA molecules comprise a 3′ polyA tail that is comprised of about 10 to about 30 adenine nucleotides. In certain embodiments, the 3′ polyA tail is comprised of 20 adenine nucleotides.

[0032] In certain embodiments, the genome editing system further comprises a first Cas9 molecule and a second Cas9 molecule that are configured to form complexes with the first and second gRNAs. In certain embodiments, at least one of the first and second Cas9 molecules comprises an S. pyogenes Cas9 molecule or an S. aureus Cas9 molecule. In certain embodiments, wherein at least one of the first and second Cas9 molecules comprises a wild-type Cas9 molecule, a mutant Cas9 molecule, or a combination thereof. In certain embodiments, the mutant Cas9 molecule comprises a D10A mutation. In certain embodiments, the genome editing system further comprises an oligonucleotide donor encoding a de132 mutation in the CCR5 gene.

[0033] The presently disclosed subject matter further provides for genome editing systems comprising a gRNA molecule comprising a targeting domain that is complementary with a target sequence of a CCR5 gene.

[0034] In certain embodiments, the targeting domain comprises a nucleotide sequence selected from SEQ ID NOS: 476 to 1569 and 1947 to 3663. In certain embodiments, the targeting domain comprises a nucleotide sequence selected from SEQ ID NOS: 208 to 475, and 1614 to 1946.

[0035] In certain embodiments, the targeting domain comprises a nucleotide sequence selected from SEQ ID NOS: 335, 480, 482, 486, 488, 490, 492, 512, 521,535, 1000, and 1002. In certain embodiments, the genome editing system further comprises an oligonucleotide donor encoding a de132 mutation in the CCR5 gene.

[0036] The presently disclosed subject matter further provides for genome editing systems comprising a gRNA molecule comprising a targeting domain that is complementary with a target sequence of a CXCR4 gene.

[0037] In certain embodiments, the targeting domain comprises a nucleotide sequence selected from SEQ ID NOS: 4064 to 5208, and 5921 to 8355. In certain embodiments, the targeting domain comprises a nucleotide sequence selected from 3740 to 4063, and 5241 to 5920. In certain embodiments, the targeting domain comprises a nucleotide sequence selected from SEQ ID NOS: 3973, 4118, and 4604.

[0038] In certain embodiments, any of the above-described gRNA molecules can be modified at its 5′ end. In certain embodiments, the modification comprises an inclusion of a 5′ cap. In certain embodiments, wherein the 5′ cap comprises a 3′-O-Me-m⁷ G(5′)ppp(5′)G anti reverse cap analog (ARCA). In certain embodiments, the gRNA molecule comprises a 3′ polyA tail that is comprised of about 10 to about 30 adenine nucleotides. In certain embodiments, the 3′ polyA tail is comprised of 20 adenine nucleotides.

[0039] The genome editing systems can comprise two, three or four gRNA molecules. In certain embodiments, the genome editing system further comprises at least one Cas9 molecule. In certain embodiments, the at least one Cas9 molecule is an S. pyogenes Cas9 molecule or an S. aureus Cas9 molecule. In certain embodiments, the at least one Cas9 molecule comprises an S. pyogenes Cas9 molecule and an S. aureus Cas9 molecule. In certain embodiments, the at least one Cas9 molecule comprises a wild-type Cas9 molecule, a mutant Cas9 molecule, or a combination thereof. In certain embodiments, the mutant Cas9 molecule comprises a D10A mutation.

[0040] The above-described genome editing systems can be used in a medicament, or for therapy. The above-described genome editing systems can be used in altering a CCR5 gene, altering a CXCR4 gene, or altering a CCR5 and a CXCR4 gene in a cell. In certain embodiments, the cell is from a subject suffering from HIV infection or AIDS. The above-described genome editing systems can be used in treating HIV infection or AIDS.

[0041] The presently disclosed subject matter provides for compositions comprising a first gRNA molecule comprising a first targeting domain that is complementary with a target sequence of a CCR5 gene, and a second gRNA molecule comprising a second targeting domain that is complementary with a target sequence of a CXCR4 gene.

[0042] In certain embodiments, the first targeting domain comprises a nucleotide sequence selected from SEQ ID NOS: 476 to 1569 and 1947 to 3663, and the second targeting domain comprises a nucleotide sequence selected from SEQ ID NOS: 4064 to 5208, and 5921 to 8355. In certain embodiments, the first targeting domain comprises a nucleotide sequence selected from SEQ ID NOS: 208 to 475, and 1614 to 1946, and the second targeting domain comprises a nucleotide sequence selected from SEQ ID NOS: 3740 to 4063, and 5241 to 5920. In certain embodiments, the first targeting domain comprises a nucleotide sequence selected from SEQ ID NOS: 476 to 1569 and 1947 to 3663, and the second targeting domain comprises a nucleotide sequence selected from SEQ ID NOS: 3740 to 4063, and 5241 to 5920. In certain embodiments, the first targeting domain comprises a nucleotide sequence selected from SEQ ID NOS: 208 to 475, and 1614 to 1946, and the second targeting domain comprises a nucleotide sequence selected from SEQ ID NOS: 4064 to 5208, and 5921 to 8355.

[0043] In certain embodiments, the composition further comprises a first Cas9 molecule and a second Cas9 molecule that are configured to form complexes with the first and second gRNAs. In certain embodiments, the at least one of the first and second Cas9 molecules comprises an S. pyogenes Cas9 molecule or an S. aureus Cas9 molecule. In certain embodiments, at least one of the first and second Cas9 molecules comprises a wild-type Cas9 molecule, a mutant Cas9 molecule, or a combination thereof. In certain embodiments, the mutant Cas9 molecule comprises a D10A mutation.

[0044] In certain embodiments, the composition is a ribonucleoprotein (RNP) composition, wherein at least one of the first and second Cas9 molecules is complexed with at least one of the first and second gRNA molecules.

[0045] The presently disclosed subject matter provides for compositions comprising a gRNA molecule comprising a targeting domain that is complementary with a target sequence of a CCR5 gene. In certain embodiments, the targeting domain comprises a nucleotide sequence selected from SEQ ID NOS: 476 to 1569 and 1947 to 3663. In certain embodiments, the targeting domain comprises a nucleotide sequence selected from SEQ ID NOS: 208 to 475, and 1614 to 1946. In certain embodiments, the targeting domain comprises a nucleotide sequence selected from SEQ ID NOS: 335, 480, 482, 486, 488, 490, 492, 512, 521,535, 1000, and 1002. In certain embodiments, the composition further comprises an oligonucleotide donor encoding a de132 mutation in the CCR5 gene.

[0046] The presently disclosed subject matter provides for compositions comprising a gRNA molecule comprising a targeting domain that is complementary with a target sequence of a CXCR4 gene. In certain embodiments, the targeting domain comprises a nucleotide sequence selected from SEQ ID NOS: 4064 to 5208, and 5921 to 8355. In certain embodiments, the targeting domain comprises a nucleotide sequence selected from SEQ ID NOS: 3740 to 4063, and 5241 to 5920. In certain embodiments, the targeting domain comprises a nucleotide sequence selected from SEQ ID NOS: 3973, 4118, and 4604.

[0047] The composition can comprise one, two, three, or four gRNA molecules. In certain embodiments, the composition further comprises at least one Cas9 molecule. In certain embodiments, the at least one Cas9 molecule is an S. pyogenes Cas9 molecule or an S. aureus Cas9 molecule. In certain embodiments, the at least one Cas9 molecule comprises an S. pyogenes Cas9 molecule and an S. aureus Cas9 molecule. In certain embodiments, the at least one Cas9 molecule comprises a wild-type Cas9 molecule, a mutant Cas9 molecule, or a combination thereof. In certain embodiments, the mutant Cas9 molecule comprises a D10A mutation. In certain embodiments, the composition is a ribonucleoprotein (RNP) composition, wherein the at least Cas9 molecules is complexed with the gRNA molecule.

[0048] The above-described compositions can be used in a medicament. The above-described compositions can be used in altering a CCR5 gene, altering a CXCR4 gene, or altering a CCR5 and a CXCR4 gene in a cell. In certain embodiments, the cell is from a subject suffering from HIV infection or AIDS. The above-described compositions can be used in treating HIV infection or AIDS.

[0049] The presently disclosed subject matter further provides for vectors comprising a polynucleotide encoding one gRNA molecule comprising a targeting domain that is complementary with a target sequence of a CCR5 gene. In certain embodiments, the targeting domain comprises a nucleotide sequence selected from SEQ ID NOS: 476 to 1569 and 1947 to 3663. In certain embodiments, the targeting domain comprises a nucleotide sequence selected from SEQ ID NOS: 208 to 475, and 1614 to 1946.

[0050] The presently disclosed subject matter provides for vectors comprising a gRNA molecule comprising a targeting domain that is complementary with a target sequence of a CXCR4 gene. In certain embodiments, the targeting domain comprises a nucleotide sequence selected from SEQ ID NOS: 4064 to 5208, and 5921 to 8355. In certain embodiments, the targeting domain comprises a nucleotide sequence selected from 3740 to 4063, and 5241 to 5920.

[0051] The presently disclosed subject matter provides for vectors comprising a polynucleotide encoding at least one of a first gRNA molecule comprising a first targeting domain that is complementary with a target sequence of a CCR5 gene, and a second gRNA molecule comprising a second targeting domain that is complementary with a target sequence of a CXCR4 gene. In certain embodiments, the first targeting domain comprises a nucleotide sequence selected from SEQ ID NOS: the first targeting domain comprises a nucleotide sequence selected from SEQ ID NOS: 476 to 1569 and 1947 to 3663, and the second targeting domain comprises a nucleotide sequence selected from SEQ ID NOS: 4064 to 5208, and 5921 to 8355. In certain embodiments, the first targeting domain comprises a nucleotide sequence selected from SEQ ID NOS: 208 to 475, and 1614 to 1946, and the second targeting domain comprises a nucleotide sequence selected from SEQ ID NOS: 3740 to 4063, and 5241 to 5920. In certain embodiments, the first targeting domain comprises a nucleotide sequence selected from SEQ ID NOS: 476 to 1569 and 1947 to 3663, and the second targeting domain comprises a nucleotide sequence selected from SEQ ID NOS: 3740 to 4063, and 5241 to 5920. In certain embodiments, the first targeting domain comprises a nucleotide sequence selected from SEQ ID NOS: 208 to 475, and 1614 to 1946, and the second targeting domain comprises a nucleotide sequence selected from SEQ ID NOS: 4064 to 5208, and 5921 to 8355.

[0052] In certain embodiments, the vector is a viral vector. In certain embodiments, the vector is an adeno-associated virus (AAV) vector.

[0053] The presently disclosed subject matter provides for methods of altering a CCR5 gene in a cell, comprising administering to the cell one of the above-described genome editing systems, or one of the above-described compositions. In certain embodiments, the alteration comprises introducing one or more mutations in the CCR5 gene, knocking out the CCR5 gene, knocking down the CCR5 gene, or combinations thereof. In certain embodiments, the method comprises introducing one or more protective mutations in the CCR5 gene. In certain embodiments, the one or more protective mutations comprise a CCR5 delta 32 mutation. In certain embodiments, the alteration of the CCR5 gene comprise homology-directed repair. In certain embodiments, the method further comprises administering to the cell a donor template. In certain embodiments, the donor template encodes an HIV fusion inhibitor.

[0054] The presently disclosed subject matter provides for methods of altering a CXCR4 gene in a cell, comprising administering to the cell one of the above-described genome editing systems, or one of the above-described compositions. In certain embodiments, the alteration comprises knocking out the CXCR4 gene, knocking down the CXCR4 gene, introducing one or more mutations in the CXCR4 gene, or combinations thereof. In certain embodiments, the one or more mutations comprise one or more single base substitutions, one or more two base substitutions, or combinations thereof.

[0055] The presently disclosed subject matter provides for methods of altering a CCR5 gene and a CXCR4 gene in a cell, comprising administering to the cell one of the above-described genome editing systems, or one of the above-described compositions. In certain embodiments, the alteration of the CCR5 gene comprises introducing one or more mutations in the CCR5 gene, knocking out the CCR5 gene, knocking down the CCR5 gene, or combinations thereof; and the alteration of the CXCR4 gene comprises knocking out the CXCR4 gene, knocking down the CXCR4 gene, introducing one or more mutations in the CXCR4 gene, or combinations thereof. In certain embodiments, the alteration of the CCR5 gene comprises introducing one or more protective mutation in the CCR5 gene. In certain embodiments, the one or more protective mutations comprise a CCR5 delta 32 mutation. In certain embodiments, the one or more mutations in the CXCR4 gene comprise one or more single base substitutions, one or more two base substitutions, or combinations thereof. In certain embodiments, at least one of the alteration of the CCR5 gene and the alteration of the CXCR4 gene comprise homology-directed repair. In certain embodiments, the method further comprises administering to the cell a donor template. In certain embodiments, the donor template encodes an HIV fusion inhibitor. In certain embodiments, the CCR5 gene and the CXCR4 gene are altered simultaneously or sequentially.

[0056] In certain embodiments, the cell is from a subject suffering from HIV infection or AIDS.

[0057] The presently disclosed subject matter provides for methods of treating or preventing HIV infection or AIDS, comprising administering to the subject one of the above-described genome editing systems, or one of the above-described compositions.

[0058] The presently disclosed subject matter provides forcells comprising at least one edited allele of a CCR5 a gene nd at least one edited allele of a CXCR4 gene. In certain embodiments, the cell is a hematopoietic stem cell, a hematopoietic progenitor cell, a multipotent progenitor cell, a common lymphoid progenitor, a common myeloid progenitor, lymphoid progenitor, a myeloid progenitor, a mature myeloid cell, a T memory stem (TSCM) cell, or a mature lymphoid cell. In the cell, the at least one edited allele of CCR5 optionally includes a transgene expression cassette encoding an anti-HIV transgene or element, or includes a selectable marker. In certain embodiments, the at least one edited allele of the CCR5 gene comprises a transgene expression cassette encoding an anti-HIV transgene or element. In certain embodiments, the edited allele of the CCR5 gene comprises a selectable marker.

[0059] The presently disclosed subject matter also provides for compositions comprising a plurality of cells characterized by at least 4% editing of a CCR5 a gene nd at least 4% editing of a CXCR4 gene, for example as measured by quantitative PCR. The plurality of cells optionally includes at least one of a hematopoietic stem cell, a hematopoietic progenitor cell, a multipotent progenitor cell, a common lymphoid progenitor, a common myeloid progenitor, lymphoid progenitor, a myeloid progenitor, a mature myeloid cell, a T memory stem (TSCM) cell, and a mature lymphoid cell, and is, in various embodiments, autologous or allogeneic.

[0060] The presently disclosed subject matter provides for methods of preparing a cell for transplantation, comprising contacting the cell with one of the above-described genome editing systems, or one of the above-described compositions.

[0061] The presently disclosed subject matter also provides for cells comprising the one of the above-described genome editing systems, one of the above-described compositions, or one of the above-described vectors.

### Alteration of CCR5

[0062] In certain embodiments, the methods, genome editing systems, and compositions discussed herein, inhibit or block a critical aspect of the HIV life cycle, i.e., CCR5-mediated entry into T cells, by alteration (e.g., inactivation of the CCR5 gene or truncation of the gene product) of CCR5 expression. Exemplary mechanisms that can be associated with the alteration of the CCR5 gene include, but are not limited to, non-homologous end joining (NHEJ) (e.g., classical or alternative), microhomology-mediated end joining (MMEJ), homology-directed repair (e.g., endogenous donor template mediated), SDSA (synthesis dependent strand annealing), single strand annealing or single strand invasion. Alteration of the CCR5 gene, e.g., mediated by NHEJ, can result in a mutation, which typically comprises a deletion or insertion (indel). The introduced mutation can take place in any region of the CCR5 gene, e.g., a promoter region or other non-coding region, or a coding region, so long as the mutation results in reduced or loss of the ability to mediate HIV entry into the cell.

[0063] In certain embodiments, the methods, genome editing systems, and compositions discussed herein are used to alter the CCR5 gene to treat or prevent HIV infection or AIDS by targeting the coding sequence of the CCR5 gene.

[0064] In certain embodiments, the gene, e.g., the coding sequence of the CCR5 gene, is targeted to knock out the gene, e.g., to eliminate expression of the gene, e.g., to knock out both alleles of the CCR5 gene, e.g., by introduction of an alteration comprising a mutation (e.g., an insertion or deletion) in the CCR5 gene. This type of alteration is sometimes referred to as “knocking out” the CCR5 gene. In certain embodiments, a targeted knockout approach is mediated by NHEJ using a CRISPR/Cas system comprising a Cas9 molecule, e.g., an enzymatically active Cas9 (eaCas9) molecule, as described herein.

[0065] In certain embodiments, the methods, genome editing systems, and compositions discussed herein are used to alter the CCR5 gene to treat or prevent HIV infection or AIDS by targeting a non-coding sequence of the CCR5 gene, e.g., a promoter, an enhancer, an intron, a 3′UTR, and/or a polyadenylation signal.

[0066] In certain embodiments, the gene, e.g., the non-coding sequence of the CCR5 gene, is targeted to knock out the gene, e.g., to eliminate expression of the gene, e.g., to knock out both alleles of the CCR5 gene, e.g., by introduction of an alteration comprising a mutation (e.g., an insertion or deletion) in the CCR5 gene. In certain embodiments, the method provides an alteration that comprises an insertion or deletion. This type of alteration is also sometimes referred to as “knocking out” the CCR5 gene. In certain embodiments, a targeted knockout approach is mediated by NHEJ using a CRISPR/Cas system comprising a Cas9 molecule, e.g., an enzymatically active Cas9 (eaCas9) molecule, as described herein.

[0067] In certain embodiments, the methods, genome editing systems, and compositions discussed herein, provide for introducing one or more mutations in the CCR5 gene. In certain embodiments, the one or more mutations comprises one or more protective mutations. In certain embodiments, the one or more protective mutations comprise a delta32 mutation in the CCR5 gene.

[0068] In certain embodiments, the methods, genome editing systems, and compositions discussed herein, provide for knocking out the CCR5 gene. In certain embodiments, knocking out the CCR5 gene comprises (1) insertion or deletion (e.g., NHEJ-mediated insertion or deletion) of one or more nucleotides of the CCR5 gene (e.g., in close proximity to or within an early coding region or in a non-coding region), and/or (2) deletion (e.g., NHEJ-mediated deletion) of a genomic sequence of the CCR5 gene (e.g., in a coding region or in a non-coding region). Both approaches can give rise to alteration (e.g., knockout) of the CCR5 gene as described herein. In certain embodiments, a CCR5 target knockout position is altered by genome editing using the CRISPR/Cas9 system. The CCR5 target knockout position can be targeted by cleaving with either one or more nucleases, or one or more nickases, or a combination thereof. In certain embodiments, knockout of a CCR5 gene is combined with a concomitant knockin of an anti-HIV gene or genes under expression of endogenous promoter or Pol III promoter. In certain embodiments, knockout of a CCR5 gene is combined with a concomitant knockin of a drug resistance selectable marker for enabling selection of modified HSCs.

[0069] “CCR5 target knockout position”, as used herein, refers to a position in the CCR5 gene, which if altered, e.g., disrupted by insertion or deletion of one or more nucleotides, e.g., by NHEJ-mediated alteration, results in alteration of the CCR5 gene. In certain embodiments, the position is in the CCR5 coding region, e.g., an early coding region. In certain embodiments, the position is in a non-coding sequence of the CCR5 gene, e.g., a promoter, an enhancer, an intron, a 3′UTR, and/or a polyadenylation signal.

[0070] In certain embodiments, the CCR5 gene is targeted for knocking down, e.g., for reducing or eliminating expression of the CCR5 gene, e.g., knocking down one or both alleles of the CCR5 gene.

[0071] In certain embodiments, the coding region of the CCR5 gene, is targeted to alter the expression of the gene. In certain embodiments, a non-coding region (e.g., an enhancer region, a promoter region, an intron, a 5′ UTR, a 3′UTR, or a polyadenylation signal) of the CCR5 gene is targeted to alter the expression of the gene. In certain embodiments, the promoter region of the CCR5 gene is targeted to knock down the expression of the CCR5 gene. This type of alteration is also sometimes referred to as “knocking down” the CCR5 gene. In certain embodiments, a targeted knockdown approach is mediated by a CRISPR/Cas system comprising a Cas9 molecule, e.g., an enzymatically inactive Cas9 (eiCas9) molecule or an eiCas9 fusion protein (e.g., an eiCas9 fused to a transcription repressor domain or chromatin modifying protein), as described herein. In certain embodiments, the CCR5 gene is targeted to alter (e.g., to block, reduce, or decrease) the transcription of the CCR5 gene. In certain embodiments, the CCR5 gene is targeted to alter the chromatin structure (e.g., one or more histone and/or DNA modifications) of the CCR5 gene. In certain embodiments, one or more gRNA molecules comprising a targeting domain are configured to target an enzymatically inactive Cas9 (eiCas9) molecule or an eiCas9 fusion protein (e.g., an eiCas9 fused to a transcription repressor domain), sufficiently close to a CCR5 target knockdown position to reduce, decrease or repress expression of the CCR5 gene.

[0072] “CCR5 target knockdown position”, as used herein, refers to a position in the CCR5 gene, which if targeted, e.g., by an eiCas9 molecule or an eiCas9 fusion described herein, results in reduction or elimination of expression of functional CCR5 gene product. In certain embodiments, the transcription of the CCR5 gene is reduced or eliminated. In certain embodiments, the chromatin structure of the CCR5 gene is altered. In certain embodiments, the position is in the CCR5 promoter sequence. In certain embodiments, a position in the promoter sequence of the CCR5 gene is targeted by an enzymatically inactive Cas9 (eiCas9) molecule or an eiCas9 fusion protein, as described herein.

[0073] “CCR5 target position”, as used herein, refers to any position that results in alteration of a CCR5 gene. In certain embodiments, a CCR5 target position comprisesa CCR5 target knockout position, a CCR5 target knockdown position, or a position within the CCR5 gene that is targeted for introduction of one or more mutations (e.g., one or more protective mutations, e.g., delta32 mutation).

[0074] In certain embodiments, disclosed herein is a gRNA molecule, e.g., an isolated or non-naturally occurring gRNA molecule, comprising a targeting domain which is complementary with a target domain (also referred to as “target sequence”) from the CCR5 gene.

[0075] In certain embodiments, the targeting domain of the gRNA molecule is configured to provide a cleavage event, e.g., a double strand break or a single strand break, sufficiently close to a CCR5 target position in the CCR5 gene to allow alteration, e.g., alteration associated with NHEJ, of a CCR5 target position in the CCR5 gene. In certain embodiments, the alteration comprises an insertion or deletion. In certain embodiments, the targeting domain is configured such that a cleavage event, e.g., a double strand or single strand break, is positioned within 1, 2, 3, 4, 5, 10, 15, 20, 25, 30, 35, 40, 45, 50, 60, 70, 80, 90, 100, 150, 200, 300, 400, 450, or 500 nucleotides of a CCR5 target position. The break, e.g., a double strand or single strand break, can be positioned upstream or downstream of a CCR5 target position in the CCR5 gene.

[0076] In certain embodiments, a second gRNA molecule comprising a second targeting domain is configured to provide a cleavage event, e.g., a double strand break or a single strand break, sufficiently close to the CCR5 target position in the CCR5 gene, to allow alteration, e.g., alteration associated with NHEJ, of the CCR5 target position in the CCR5 gene, either alone or in combination with the break positioned by said first gRNA molecule. In certain embodiments, the targeting domains of the first and second gRNA molecules are configured such that a cleavage event, e.g., a double strand or single strand break, is positioned, independently for each of the gRNA molecules, within 1, 2, 3, 4, 5, 10, 15, 20, 25, 30, 35, 40, 45, 50, 60, 70, 80, 90, 100, 150, 200, 300, 400, 450, or 500 nucleotides of the target position. In certain embodiments, the breaks, e.g., double strand or single strand breaks, are positioned on both sides of a nucleotide of a CCR5 target position in the CCR5 gene. In certain embodiments, the breaks, e.g., double strand or single strand breaks, are positioned on one side, e.g., upstream or downstream, of a nucleotide of a CCR5 target position in the CCR5 gene.

[0077] In certain embodiments, when CCR5 is targeted for knock out, a single strand break is accompanied by an additional single strand break, positioned by a second gRNA molecule, as discussed below. For example, the targeting domains are configured such that a cleavage event, e.g., the two single strand breaks, are positioned within 1, 2, 3, 4, 5, 10, 15, 20, 25, 30, 35, 40, 45, 50, 60, 70, 80, 90, 100, 150, 200, 300, 400, 450, or 500 nucleotides of a CCR5 target position. In certain embodiments, the first and second gRNA molecules are configured such, that when guiding a Cas9 molecule, e.g., a Cas9 nickase, a single strand break can be accompanied by an additional single strand break, positioned by a second gRNA, sufficiently close to one another to result in alteration of a CCR5 target position in the CCR5 gene. In certain embodiments, the first and second gRNA molecules are configured such that a single strand break positioned by said second gRNA is within 1, 2, 3, 4, 5, 10, 20, 30, 40, 50, 60, 70, 80, 90, 100, 200, 300, 400, 500, 600, 700, 800, 900, or 1000 nucleotides of the break positioned by said first gRNA molecule, e.g., when the Cas9 molecule is a nickase. In certain embodiments, the two gRNA molecules are configured to position cuts at the same position, or within a few nucleotides of one another, on different strands, e.g., essentially mimicking a double strand break.

[0078] In certain embodiments, when CCR5 is targeted for knock out, a double strand break can be accompanied by an additional double strand break, positioned by a second gRNA molecule, as is discussed below. For example, the targeting domain of a first gRNA molecule is configured such that a double strand break is positioned upstream of a CCR5 target position in the CCR5 gene, e.g., within 1, 2, 3, 4, 5, 10, 15, 20, 25, 30, 35, 40, 45, 50, 60, 70, 80, 90, 100, 150, 200, 300, 400, 450, or 500 nucleotides of the target position; and the targeting domain of a second gRNA molecule is configured such that a double strand break is positioned downstream of a CCR5 target position in the CCR5 gene, e.g., within 1, 2, 3, 4, 5, 10, 15, 20, 25, 30, 35, 40, 45, 50, 60, 70, 80, 90, 100, 150, 200, 300, 400, 450, or 500 nucleotides of the target position. In certain embodiments, the first and second gRNA molecules are configured such that a double strand break positioned by said second gRNA is within 10, 20, 30, 40, 50, 60, 70, 80, 90, 100, 200, 300, 400, 500, 600, 700, 800, 900, or 1000 nucleotides of the break positioned by said first gRNA molecule.

[0079] In certain embodiments, the targeting domains of the first and second gRNA molecules are configured such that a cleavage event, e.g., a single strand break, is positioned, independently for each of the gRNA molecules.

[0080] In certain embodiments, when CCR5 is targeted for knock out, a double strand break can be accompanied by two additional single strand breaks, positioned by a second gRNA molecule and a third gRNA molecule. For example, the targeting domain of a first gRNA molecule is configured such that a double strand break is positioned upstream of a CCR5 target position in the CCR5 gene, e.g., within 1, 2, 3, 4, 5, 10, 15, 20, 25, 30, 35, 40, 45, 50, 60, 70, 80, 90, 100, 150, 200, 300, 400, 450, or 500 nucleotides of the target position; and the targeting domains of a second and third gRNA molecule are configured such that two single strand breaks are positioned downstream of a CCR5 target position in the CCR5 gene, e.g., within 1, 2, 3, 4, 5, 10, 15, 20, 25, 30, 35, 40, 45, 50, 60, 70, 80, 90, 100, 150, 200, 300, 400, 450, or 500 nucleotides of the target position. In certain embodiments, the first, second and third gRNA molecules are configured such that a single strand break positioned by said second or third gRNA molecule is within 10, 20, 30, 40, 50, 60, 70, 80, 90, 100, 200, 300, 400, 500, 600, 700, 800, 900, or 1000 nucleotides of the break positioned by said first gRNA molecule. In certain embodiments, the targeting domains of the first, second and third gRNA molecules are configured such that a cleavage event, e.g., a double strand or single strand break, is positioned, independently for each of the gRNA molecules.

[0081] In certain embodiments, when CCR5 is targeted for knock out, a first and second single strand breaks can be accompanied by two additional single strand breaks positioned by a third gRNA molecule and a fourth gRNA molecule. For example, the targeting domain of a first and second gRNA molecule are configured such that two single strand breaks are positioned upstream of a CCR5 target position in the CCR5 gene, e.g., within 1, 2, 3, 4, 5, 10, 15, 20, 25, 30, 35, 40, 45, 50, 60, 70, 80, 90, 100, 150, 200, 300, 400, 450, or 500 nucleotides of the target position; and the targeting domains of a third and fourth gRNA molecule are configured such that two single strand breaks are positioned downstream of a CCR5 target position in the CCR5 gene, e.g., within 1, 2, 3, 4, 5, 10, 15, 20, 25, 30, 35, 40, 45, 50, 60, 70, 80, 90, 100, 150, 200, 300, 400, 450, or 500 nucleotides of the target position. In certain embodiments, the first, second, third and fourth gRNA molecules are configured such that the single strand break positioned by said third or fourth gRNA molecule is within 10, 20, 30, 40, 50, 60, 70, 80, 90, 100, 200, 300, 400, 500, 600, 700, 800, 900, or 1000 nucleotides of the break positioned by said first or second gRNA molecule, e.g., when the Cas9 molecule is a nickase. In certain embodiments, the targeting domains of the first, second, third and fourth gRNA molecules are configured such that a cleavage event, e.g., a single strand break, is positioned, independently for each of the gRNA molecules.

[0082] In certain embodiments, when multiple gRNAs are used to generate (1) two single stranded breaks in close proximity, (2) two double stranded breaks, e.g., flanking a CCR5 target position (e.g., to remove a piece of DNA, e.g., a insertion or deletion mutation) or to create more than one indel in an early coding region, (3) one double stranded break and two paired nicks flanking a CCR5 target position (e.g., to remove a piece of DNA, e.g., a insertion or deletion mutation) or (4) four single stranded breaks, two on each side of a CCR5 target position, that they are targeting the same CCR5 target position. It is further contemplated herein that in certain embodiments multiple gRNAs may be used to target more than one target position in the same gene.

[0083] In certain embodiments, the targeting domain of the first gRNA molecule and the targeting domain of the second gRNA molecules are complementary to opposite strands of the target nucleic acid molecule. In certain embodiments, the gRNA molecule and the second gRNA molecule are configured such that the PAMs are oriented outward.

[0084] In certain embodiments, the targeting domain of a gRNA molecule is configured to avoid unwanted target chromosome elements, such as repeat elements, e.g., Alu repeats, in the target domain (also referred to as “target sequence”). The gRNA molecule may be a first, second, third and/or fourth gRNA molecule, as described herein.

[0085] In certain embodiments, the targeting domain of a gRNA molecule is configured to position a cleavage event sufficiently far from a preselected nucleotide, e.g., the nucleotide of a coding region, such that the nucleotide is not altered. In certain embodiments, the targeting domain of a gRNA molecule is configured to position an intronic cleavage event sufficiently far from an intron/exon border, or naturally occurring splice signal, to avoid alteration of the exonic sequence or unwanted splicing events. The gRNA molecule may be a first, second, third and/or fourth gRNA molecule, as described herein.

[0086] In certain embodiments, a CCR5 target position is targeted and the targeting domain of a gRNA molecule comprises a sequence that is the same as, or differs by no more than 1, 2, 3, 4, or 5 nucleotides from, a targeting domain sequence comprising a nucleotide sequence selected from SEQ ID NOS: 208 to 3739. In certain embodiments, the targeting domain comprises a nucleotide sequence selected from SEQ ID NOS: 208 to 3739. In certain embodiments, the targeting domain is independently selected from:

(SEQ ID NO: 208)

ACUAUGCUGCCGCCCAG;

(SEQ ID NO: 209)

UCCUCCUGACAAUCGAU;

(SEQ ID NO: 210)

CUAUGCUGCCGCCCAGU;

(SEQ ID NO: 211)

GCCGCCCAGUGGGACUU;

(SEQ ID NO: 212)

UUGACAGGGCUCUAUUUUAU;
or

(SEQ ID NO: 213)

UCACUAUGCUGCCGCCCAGU.

[0087] In certain embodiments, the targeting domain comprises a nucleotide sequence selected from SEQ ID NOS: 208 to 1569 and 1614 to 3663. In certain embodiments, the targeting domain comprises a nucleotide sequence selected from 335, 480, 482, 486, 488, 490, 492, 512, 521, 535, 1000, and 1002.

[0088] In certain embodiments, more than one gRNA is used to position breaks, e.g., two single stranded breaks or two double stranded breaks, or a combination of single strand and double strand breaks, e.g., to create one or more indels, in the target nucleic acid sequence. In certain embodiments, two, three or four gRNA molecules are used to position breaks. In certain embodiments, the targeting domain of each gRNA molecules comprises a nucleotide sequence selected from SEQ ID NOS: 208 to 3739. In certain embodiments, the targeting domain of each gRNA molecules comprises a nucleotide sequence selected from SEQ ID NOS: 208 to 1569 and 1614 to 3663. In certain embodiments, the genome editing systems or compositions described herein comprise two gRNA molecules that target a CCR5 gene (a first CCR5 gRNA molecule and a second CCR5 gRNA molecule). In certain embodiments, the first CCR5 gRNA molecule comprises a targeting domain comprising the nucleotide sequence set forth in SEQ ID NO: 480, and the second CCR5 gRNA molecule comprises a targeting domain comprising the nucleotide sequence set forth in SEQ ID NO: 448. In certain embodiments, the first CCR5 gRNA molecule comprises a targeting domain comprising the nucleotide sequence set forth in SEQ ID NO: 480, and the second CCR5 gRNA molecule comprises a targeting domain comprising the nucleotide sequence set forth in SEQ ID NO: 335.

[0089] In certain embodiments, the targeting domain of the gRNA molecule is configured to target an enzymatically inactive Cas9 (eiCas9) molecule or an eiCas9 fusion protein (e.g., an eiCas9 fused to a transcription repressor domain), sufficiently close to a CCR5 transcription start site (TSS) to reduce (e.g., block) transcription, e.g., transcription initiation or elongation, binding of one or more transcription enhancers or activators, and/or RNA polymerase. In certain embodiments, the targeting domain is configured to target between 1000 bp upstream and 1000 bp downstream (e.g., between 500 bp upstream and 1000 bp downstream, between 1000 bp upstream and 500 bp downstream, between 500 bp upstream and 500 bp downstream, within 500 bp or 200 bp upstream, or within 500 bp or 200 bp downstream) of the TSS of the CCR5 gene. One or more gRNAs may be used to target an eiCas9 to the promoter region of the CCR5 gene.

[0090] In certain embodiments, the targeting domain comprises a nucleotide sequence that is the same as, or differs by no more than 1, 2, 3, 4, or 5 nucleotides from, a nucleotide sequence selected from SEQ ID NO: 208 to 3739. In certain embodiments, the targeting domain comprises a nucleotide sequence selected from SEQ ID NOS: 208 to 3739. In certain embodiments, the targeting domain comprises a nucleotide sequence selected from SEQ ID NOS: 208 to 1569 and 1614 to 3663.

[0091] In certain embodiments, the CCR5 gene is targeted for knockout, and the targeting domain of the gRNA molecule can comprise a nucleotide sequence that is the same as, or differs by no more than 1, 2, 3, 4, or 5 nucleotides from, the nucleotide sequence selected from SEQ ID NOS: 208 to 1613. In certain embodiments, the targeting domain comprises a nucleotide sequence selected from SEQ ID NOS: 208 to 1613. In certain embodiments, the targeting domain comprises a nucleotide sequence selected from SEQ ID NOS: 208 to 1569. In certain embodiments, the targeting domain comprises a nucleotide sequence selected from 335, 480, 482, 486, 488, 490, 492, 512, 521, 535, 1000, and 1002.

[0092] In certain embodiments, when the CCR5 gene is targeted for knockdown, and the targeting domain of the gRNA molecule can comprise a nucleotide sequence that is the same as, or differs by no more than 1, 2, 3, 4, or 5 nucleotides from, the nucleotide sequence selected from SEQ ID NOS: 1614 to 3739. In certain embodiments, the targeting domain comprises a nucleotide sequence selected from SEQ ID NOS: 1614 to 3739. In certain embodiments, the targeting domain comprises a nucleotide sequence selected from SEQ ID NOS: 1614 to 3663.

[0093] In certain embodiments, the promoter region of the CCR5 gene is targeted for knowdown. In certain embodiments, when the CCR5 target knockdown position is the CCR5 promoter region and more than one gRNA molecule is used to position an eiCas9 molecule or an eiCas9-fusion protein (e.g., an eiCas9-transcription repressor domain fusion protein), in the target nucleic acid sequence, the targeting domain for each gRNA molecule comprises a nucleotide sequence selected from SEQ ID NOS: 1614 to 3739. In certain embodiments, the targeting domain comprises a nucleotide sequence selected from SEQ ID NOS: 1614 to 3663.

[0094] In certain embodiments, the targeting domain which is complementary with a target domain (also referred to as “target sequence”) from the CCR5 target position in the CCR5 gene is 16 nucleotides or more in length. In certain embodiments, the targeting domain is 16 nucleotides in length. In certain embodiments, the targeting domain is 17 nucleotides in length. In other embodiments, the targeting domain is 18 nucleotides in length. In still other embodiments, the targeting domain is 19 nucleotides in length. In still other embodiments, the targeting domain is 20 nucleotides in length. In certain embodiments, the targeting domain is 21 nucleotides in length. In certain embodiments, the targeting domain is 22 nucleotides in length. In certain embodiments, the targeting domain is 23 nucleotides in length. In certain embodiments, the targeting domain is 24 nucleotides in length. In certain embodiments, the targeting domain is 25 nucleotides in length. In certain embodiments, the targeting domain is 26 nucleotides in length.

[0095] In certain embodiments, the targeting domain comprises 16 nucleotides. In certain embodiments, the targeting domain comprises 17 nucleotides. In certain embodiments, the targeting domain comprises 18 nucleotides. In certain embodiments, the targeting domain comprises 19 nucleotides. In certain embodiments, the targeting domain comprises 20 nucleotides. In certain embodiments, the targeting domain comprises 21 nucleotides. In certain embodiments, the targeting domain comprises 22 nucleotides. In certain embodiments, the targeting domain comprises 23 nucleotides. In certain embodiments, the targeting domain comprises 24 nucleotides. In certain embodiments, the targeting domain comprises 25 nucleotides. In certain embodiments, the targeting domain comprises 26 nucleotides.

[0096] A gRNA as described herein may comprise from 5′ to 3′: a targeting domain (comprising a “core domain”, and optionally a “secondary domain”); a first complementarity domain; a linking domain; a second complementarity domain; a proximal domain; and a tail domain. In certain embodiments, the proximal domain and tail domain are taken together as a single domain.

[0097] In certain embodiments, a gRNA comprises a linking domain of no more than 25 nucleotides in length; a proximal and tail domain, that taken together, are at least 20, at least 25, at least 30, at least 35, or at least 40 nucleotides in length; and a targeting domain equal to or greater than 16, 17, 18, 19, 20, 21, 22, 23, 24, 25 or 26 nucleotides in length.

[0098] A cleavage event, e.g., a double strand or single strand break, is generated by a Cas9 molecule. The Cas9 molecule may be an enzymatically active Cas9 (eaCas9) molecule, e.g., an eaCas9 molecule that forms a double strand break in a target nucleic acid or an eaCas9 molecule forms a single strand break in a target nucleic acid (e.g., a nickase molecule).

[0099] In certain embodiments, the eaCas9 molecule catalyzes a double strand break.

[0100] In certain embodiments, the eaCas9 molecule comprises HNH-like domain cleavage activity but has no, or no significant, N-terminal RuvC-like domain cleavage activity. In this case, the eaCas9 molecule is an HNH-like domain nickase, e.g., the eaCas9 molecule comprises a mutation at D10, e.g., D10A. In other embodiments, the eaCas9 molecule comprises N-terminal RuvC-like domain cleavage activity but has no, or no significant, HNH-like domain cleavage activity. In certain embodiments, the eaCas9 molecule is an N-terminal RuvC-like domain nickase, e.g., the eaCas9 molecule comprises a mutation at H840, e.g., H840A. In certain embodiments, the eaCas9 molecule is an N-terminal RuvC-like domain nickase, e.g., the eaCas9 molecule comprises a mutation at N863, e.g., N863A. In certain embodiments, the eaCas9 molecule is an N-terminal RuvC-like domain nickase, e.g., the eaCas9 molecule comprises a mutation at N580, e.g., N580A.

[0101] In certain embodiments, a single strand break is formed in the strand of the target nucleic acid to which the targeting domain of said gRNA is complementary. In certain embodiments, a single strand break is formed in the strand of the target nucleic acid other than the strand to which the targeting domain of said gRNA is complementary.

[0102] The presently disclosed subject matter also provides for a nucleic acid composition, e.g., an isolated or non-naturally occurring nucleic acid composition, e.g., DNA, that comprises (a) a first nucleotide sequence that encodes a first gRNA molecule comprising a targeting domain that is complementary with a CCR5 target position in the CCR5 gene as disclosed herein. In certain embodiments, the first gRNA molecule comprises a targeting domain configured to provide a cleavage event, e.g., a double strand break or a single strand break, sufficiently close to a CCR5 target position in the CCR5 gene to allow alteration, e.g., alteration associated with NHEJ, of a CCR5 target position in the CCR5 gene. In certain embodiments, the first gRNA molecule comprises a targeting domain configured to target an enzymatically inactive Cas9 (eiCas9) molecule or an eiCas9 fustion protein (e.g., an eiCas9 fused to a transcription repressor domain or chromatin modifying protein), sufficiently close to a CCR5 knockdown target position to reduce, decrease or repress expression of the CCR5 gene. In certain embodiments, the first gRNA molecule comprises a targeting domain comprising a nucleotide sequence that is the same as, or differs by no more than 1, 2, 3, 4, or 5 nucleotides from, a nucleotide sequence selected from SEQ ID NOS: 208 to 3739, SEQ ID NOS: 208 to 1613, or SEQ ID NOS: 1614 to 3739. In certain embodiments, the first gRNA molecule comprises a targeting domain comprising a nucleotide sequence selected from SEQ ID NOS: 208 to 3739, SEQ ID NOS: 208 to 1613, or SEQ ID NOS: 1614 to 3739.

[0103] In certain embodiments, the nucleic acid composition further comprises (b) a second nucleotide sequence that encodes a Cas9 molecule. In certain embodiments, the Cas9 molecule is a nickase molecule, an enzymatically active Cas9 (eaCas9) molecule, e.g., an eaCas9 molecule that forms a double strand break in a target nucleic acid and/or an eaCas9 molecule that forms a single strand break in a target nucleic acid. In certain embodiments, a single strand break is formed in the strand of the target nucleic acid to which the targeting domain of said gRNA is complementary. In certain embodiments, a single strand break is formed in the strand of the target nucleic acid other than the strand to which to which the targeting domain of said gRNA is complementary. In certain embodiments, the eaCas9 molecule catalyzes a double strand break.

[0104] In certain embodiments, the eaCas9 molecule comprises HNH-like domain cleavage activity but has no, or no significant, N-terminal RuvC-like domain cleavage activity. In certain embodiments, the said eaCas9 molecule is an HNH-like domain nickase, e.g., the eaCas9 molecule comprises a mutation at D10, e.g., D10A. In certain embodiments, the eaCas9 molecule comprises N-terminal RuvC-like domain cleavage activity but has no, or no significant, HNH-like domain cleavage activity. In certain embodiments, the eaCas9 molecule is an N-terminal RuvC-like domain nickase, e.g., the eaCas9 molecule comprises a mutation at H840, e.g., H840A. In certain embodiments, the eaCas9 molecule is an N-terminal RuvC-like domain nickase, e.g., the eaCas9 molecule comprises a mutation at N863, e.g., N863A. In certain embodiments, the eaCas9 molecule is an N-terminal RuvC-like domain nickase, e.g., the eaCas9 molecule comprises a mutation at N580, e.g., N580A.

[0105] In certain embodiments, the Cas9 molecule is an enzymatically inactive Cas9 (eiCas9) molecule or a modified eiCas9 molecule, e.g., the eiCas9 molecule is fused to Krüppel-associated box (KRAB) to generate an eiCas9-KRAB fusion protein molecule.

[0106] In certain embodiments, the nucleic acid composition further comprises (c)(i) a third nucleotide sequence that encodes a second gRNA molecule described herein having a targeting domain that is complementary to a second target domain of the CCR5 gene, and optionally, (c)(ii) a fourth nucleotide sequence that encodes a third gRNA molecule described herein having a targeting domain that is complementary to a third target domain of the CCR5 gene; and optionally, (c)(iii) a fifth nucleotide sequence that encodes a fourth gRNA molecule described herein having a targeting domain that is complementary to a fourth target domain of the CCR5 gene.

[0107] In certain embodiments, the second gRNA molecule comprises a targeting domain configured to provide a cleavage event, e.g., a double strand break or a single strand break, sufficiently close to a CCR5 target position in the CCR5 gene, to allow alteration, e.g., alteration associated with NHEJ, of a CCR5 target position in the CCR5 gene, either alone or in combination with the break positioned by said first gRNA molecule. In certain embodiments, the second gRNA molecule comprises a targeting domain configured to target an enzymatically inactive Cas9 (eiCas9) molecule or an eiCas9 fustion protein (e.g., an eiCas9 fused to a transcription repressor domain or chromatin modifying protein), sufficiently close to a CCR5 knockdown target position to reduce, decrease or repress expression of the CCR5 gene.

[0108] In certain embodiments, the third gRNA molecule comprises a targeting domain configured to provide a cleavage event, e.g., a double strand break or a single strand break, sufficiently close to a CCR5 target position in the CCR5 gene to allow alteration, e.g., alteration associated with NHEJ, of a CCR5 target position in the CCR5 gene, either alone or in combination with the break positioned by the first and/or second gRNA molecule. In certain embodiments, the third gRNA molecule comprises a targeting domain configured to target an enzymatically inactive Cas9 (eiCas9) molecule or an eiCas9 fustion protein (e.g., an eiCas9 fused to a transcription repressor domain or chromatin remodeling protein), sufficiently close to a CCR5 knockdown target position to reduce, decrease or repress expression of the CCR5 gene.

[0109] In certain embodiments, the fourth gRNA molecule comprises a targeting domain configured to provide a cleavage event, e.g., a double strand break or a single strand break, sufficiently close to a CCR5 target position in the CCR5 gene to allow alteration, e.g., alteration associated with NHEJ, of a CCR5 target position in the CCR5 gene, either alone or in combination with the break positioned by the first gRNA molecule, the second gRNA molecule and/or the third gRNA molecule.

[0110] In certain embodiments, the second gRNA targets the same CCR5 target position as the first gRNA molecule. In certain embodiments, the third gRNA molecule and the fourth gRNA molecule target the same CCR5 target position as the first and second gRNA molecules.

[0111] The targeting domain of each of the second, third, and fourth gRNA molecules can comprise a nucleotide sequence that is the same as, or differs by no more than 1, 2, 3, 4, or 5 nucleotides from, a nucleotide sequence selected from SEQ ID NOS: 208 to 3739, SEQ ID NOS: 208 to 1613, or SEQ ID NOS: 1614 to 3739. In certain embodiments, the targeting domain of each of the second, third, and fourth gRNA molecules comprises a nucleotide sequence selected from SEQ ID NOS: 208 to 3739, SEQ ID NOS: 208 to 1613, or SEQ ID NOS: 1614 to 3739.

[0112] When multiple gRNAs are used, any combination of modular or chimeric gRNAs may be used.

[0113] In certain embodiments, the first gRNA molecule of (a) and the Cas9 molecule of (b) are present on one nucleic acid molecule, e.g., one vector, e.g., one viral vector, e.g., one adeno-associated virus (AAV) vector. In certain embodiments, the nucleic acid molecule is an AAV vector. Exemplary AAV vectors that may be used in any of the described compositions and methods include an AAV1 vector, a modified AAV1 vector, an AAV2 vector, a modified AAV2 vector, an AAV3 vector, an AAV4 vector, a modified AAV4 vector, an AAV5 vector, a modified AAV5 vector, a modified AAV3 vector, an AAV6 vector, a modified AAV6 vector, an AAV8 vector an AAV9 vector, an AAV.rh10 vector, a modified AAV.rh10 vector, an AAV.rh32/33 vector, a modified AAV.rh32/33 vector, an AAV.rh43 vector, a modified AAV.rh43 vector, an AAV.rh64R1 vector, and a modified AAV.rh64R1 vector.

[0114] In certain embodiments, (a) is present on a first nucleic acid molecule, e.g. a first vector, e.g., a first viral vector, e.g., a first AAV vector; and (b) is present on a second nucleic acid molecule, e.g., a second vector, e.g., a second vector, e.g., a second AAV vector. The first and second nucleic acid molecules may be AAV vectors.

[0115] In certain embodiments, the first gRNA molecule of (a) and the second gRNA molecule of (c)(i), optionally, the fourth gRNA molecule of (c)(ii) and the fifth gRNA molecule of (c)(iii) are present on one nucleic acid molecule, e.g., one vector, e.g., one viral vector, e.g., one AAV vector. In certain embodiments, the nucleic acid molecule is an AAV vector.

[0116] In certain embodiments, (a) and (c)(i) are present on different vectors. For example, (a) is present on a first nucleic acid molecule, e.g. a first vector, e.g., a first viral vector, e.g., a first AAV vector; and (c)(i) is present on a second nucleic acid molecule, e.g., a second vector, e.g., a second vector, e.g., a second AAV vector. In certain embodiments, the first and second nucleic acid molecules are AAV vectors.

[0117] In certain embodiments, each of (a), (b), and (c)(i) are present on one nucleic acid molecule, e.g., one vector, e.g., one viral vector, e.g., an AAV vector. In certain embodiments, the nucleic acid molecule is an AAV vector. In certain embodiment, one of (a), (b), and (c)(i) is encoded on a first nucleic acid molecule, e.g., a first vector, e.g., a first viral vector, e.g., a first AAV vector; and a second and third of (a), (b), and (c)(i) is encoded on a second nucleic acid molecule, e.g., a second vector, e.g., a second vector, e.g., a second AAV vector. The first and second nucleic acid molecule may be AAV vectors.

[0118] In certain embodiments, (a) is present on a first nucleic acid molecule, e.g., a first vector, e.g., a first viral vector, a first AAV vector; and (b) and (c)(i) are present on a second nucleic acid molecule, e.g., a second vector, e.g., a second vector, e.g., a second AAV vector. The first and second nucleic acid molecule may be AAV vectors.

[0119] In certain embodiments, (b) is present on a first nucleic acid molecule, e.g., a first vector, e.g., a first viral vector, e.g., a first AAV vector; and (a) and (c)(i) are present on a second nucleic acid molecule, e.g., a second vector, e.g., a second vector, e.g., a second AAV vector. The first and second nucleic acid molecule may be AAV vectors.

[0120] In certain embodiments, (c)(i) is present on a first nucleic acid molecule, e.g., a first vector, e.g., a first viral vector, e.g., a first AAV vector; and (b) and (a) are present on a second nucleic acid molecule, e.g., a second vector, e.g., a second vector, e.g., a second AAV vector. The first and second nucleic acid molecule may be AAV vectors.

[0121] In certain embodiments, (a), (b) and (c)(i), optionally (c)(ii) and (c)(iii) are present together in a genome editing system. In certain embodiments, each of (a), (b) and (c)(i) are present on different nucleic acid molecules, e.g., different vectors, e.g., different viral vectors, e.g., different AAV vector. For example, (a) may be on a first nucleic acid molecule, (b) on a second nucleic acid molecule, and (c)(i) on a third nucleic acid molecule. The first, second and third nucleic acid molecule may be AAV vectors.

[0122] In certain embodiments, when a third and/or fourth gRNA molecule are present, each of (a), (b), (c)(i), (c)(ii) and (c)(iii) may be present on one nucleic acid molecule, e.g., one vector, e.g., one viral vector, e.g., an AAV vector. In certain embodiments, the nucleic acid molecule is an AAV vector. In certain embodiments, each of (a), (b), (c)(i), (c)(ii) and (c)(iii) may be present on the different nucleic acid molecules, e.g., different vectors, e.g., the different viral vectors, e.g., different AAV vectors. In a further embodiment, each of (a), (b), (c)(i), (c)(ii) and (c)(iii) may be present on more than one nucleic acid molecule, but fewer than five nucleic acid molecules, e.g., AAV vectors.

[0123] The nucleic acid composition described herein may comprise a promoter operably linked to the first nucleotide sequence that encodes the first gRNA molecule of (a), e.g., a promoter described herein. The nucleic acid composition may further comprise a second promoter operably linked to the third nucleotide sequence that encodes the second gRNA molecule of (c)(i), e.g., a promoter described herein. The promoter and second promoter differ from one another. In certain embodiments, the promoter and second promoter are the same.

[0124] The nucleic acid composition described herein may further comprise a promoter operably linked to the second nucleotide sequence that encodes the Cas9 molecule of (b), e.g., a promoter described herein.

[0125] In certain embodiments, disclosed herein is a composition comprising (a) a gRNA molecule comprising a targeting domain that is complementary with a target domain (also referred to as “target sequence”) in the CCR5 gene, as described herein. The composition of (a) may further comprise (b) a Cas9 molecule, e.g., a Cas9 molecule as described herein. A composition of (a) and (b) may further comprise (c) a second gRNA molecule, optionally a third gRNA molecule and a fourth gRNA molecule, e.g., a second, third and/or fourth gRNA molecule described herein. In certain embodiments, the composition is a pharmaceutical composition, e.g. a composition including a pharmaceutically acceptable carrier or excipient. The compositions described herein, e.g., pharmaceutical compositions described herein, can be used in the treatment or prevention of HIV or AIDS in a subject, e.g., in accordance with a method disclosed herein.

[0126] In certain embodiments, disclosed herein is a method of altering a cell, e.g., altering the structure, e.g., altering the sequence, of a target nucleic acid of a cell, comprising contacting said cell with: (a) a gRNA that targets the CCR5 gene, e.g., a gRNA as described herein; (b) a Cas9 molecule, e.g., a Cas9 molecule as described herein; and optionally, (c) a second gRNA molecule that targets the CCR5 gene, as described herein. In certain embodiments, the method comprises contacting the cell with a third gRNA molecule and further with a fourth gRNA molcule, as described herein.

[0127] In certain embodiments, the method comprises contacting said cell with (a) and (b). In certain embodiments, the method comprises contacting said cell with (a), (b), and (c).

[0128] In certain embodiments, the cell is from a subject suffering from or likely to develop an HIV infection or AIDS. The cell may be from a subject who does not have a mutation at a CCR5 target position.

[0129] In certain embodiments, the cell being contacted in the disclosed method is a target cell from a circulating blood cell, a progenitor cell, or a stem cell, e.g., a hematopoietic stem cell (HSC) or a hematopoietic stem/progenitor cell (HSPC). In certain embodiments, the target cell is a T cell (e.g., a CD4⁺ T cell, a CD8⁺ T cell, a helper T cell, a regulatory T cell, a cytotoxic T cell, a memory T cell, a T cell precursor or a natural killer T cell), a B cell (e.g., a progenitor B cell, a Pre B cell, a Pro B cell, a memory B cell, a plasma B cell), a monocyte, a megakaryocyte, a neutrophil, an eosinophil, a basophil, a mast cell, a reticulocyte, a lymphoid progenitor cell, a myeloid progenitor cell, or a hematopoietic stem cell, or a hematopoietic progenitor cell. In certain embodiments, the target cell is a bone marrow cell, (e.g., a lymphoid progenitor cell, a myeloid progenitor cell, an erythroid progenitor cell, a hematopoietic stem cell, a hematopoietic progenitor cell, an endothelial cell, or a mesenchymal stem cell). In certain embodiments, the cell is a CD4 cell, a T cell, a gut associated lymphatic tissue (GALT), a macrophage, a dendritic cell, a myeloid precursor cell, or a microglial cell. The contacting may be performed ex vivo and the contacted cell may be returned to the subject's body after the contacting step. In certain embodiments, the contacting step may be performed in vivo.

[0130] In certain embodiments, the method of altering a cell as described herein comprises acquiring knowledge of the presence of a CCR5 target position in said cell, prior to the contacting step. Acquiring knowledge of the presence of a CCR5 target position in the cell may be by sequencing the CCR5 gene, or a portion of the CCR5 gene.

[0131] In certain embodiments, the method comprises contacting the cell with a nucleic acid composition, e.g., a vector, e.g., an AAV vector, that expresses at least one of (a), (b), and (c). In certain embodiments, the method comprises contacting the cell with a nucleic acid composition, e.g., a vector, e.g., an AAV vector, that encodes each of (a), (b), and (c). In certain embodiments, the method comprises delivering to the cell the Cas9 molecule of (b) and a nucleic acid composition that encodes a gRNA molecule of (a) and optionally, a second gRNA molecule of (c)(i) (and further optionally, a third gRNA molecule of (c)(ii) and/or fourth gRNA molecule of (c)(iii).

[0132] In certain embodiments, the method comprises contacting the cell with a nucleic acid composition, e.g., a vector. In certain embodiments, the vector is an AAV vector, e.g., an AAV1 vector, a modified AAV1 vector, an AAV2 vector, a modified AAV2 vector, an AAV3 vector, a modified AAV3 vector, an AAV4 vector, a modified AAV4 vector, an AAV5 vector, a modified AAV5 vector, an AAV6 vector, a modified AAV6 vector, an AAV7 vector, a modified AAV7 vector, an AAV8 vector, an AAV9 vector, an AAV.rh10 vector, a modified AAV.rh10 vector, an AAV.rh32/33 vector, a modified AAV.rh32/33 vector, an AAV.rh43vector, a modified AAV.rh43vector, an AAV.rh64R1vector, and a modified AAV.rh64R1vector, as described herein. In certain embodiments, the vector is a lentivirus, e.g., an IDLV (integration deficienct lentivirus vector).

[0133] In certain embodiments, the method comprises delivering to the cell a Cas9 molecule of (b), as a protein or an mRNA, and a nucleic acid composition that encodes a gRNA molecule of (a) and optionally a second, third and/or fourth gRNA molecule of (c). In certain embodiments, the method comprises delivering to the cell a Cas9 molecule of (b), as a protein or an mRNA, said gRNA molecule of (a), as an RNA, and optionally said second, third and/or fourth gRNA molecule of (c), as an RNA. In certain embodiments, the method comprises delivering to the cell a gRNA molecule of (a) as an RNA, optionally the second, third and/or fourth gRNA molecule of (c) as an RNA, and a nucleic acid that encodes the Cas9 molecule of (b). In certain embodiments, the first gRNA molecule, the Cas 9 molecule, and the second gRNA molecule are present together in a genome editing system.

[0134] In certain embodiments, the contacting step further comprises contacting the cell with an HSC self-renewal agonist, e.g., UM171 ((I r,4r)-N1-(2-benzyl-7-(2-methyl-2H-tetrazol-5-yl)-9H-pyrimido[4,5-b]indol-4-yl)cyclohexane-1,4-diamine) or a pyrimidoindole derivative described in Fares et al., Science, 2014, 345(6203): 1509-1512). In certain embodiments, the cell is contacted with the HSC self-renewal agonist before (e.g., at least 1, 2, 4, 8, 12, 24, 36, or 48 hours before, e.g., about 2 hours before) the cell is contacted with a gRNA molecule and/or a Cas9 molecule. In certain embodiments, the cell is contacted with the HSC self-renewal agonist after (e.g., at least 1, 2, 4, 8, 12, 24, 36, or 48 hours after, e.g., about 24 hours after) the cell is contacted with a gRNA molecule and/or a Cas9 molecule. In yet certain embodiments, the cell is contacted with the HSC self-renewal agonist before (e.g., at least 1, 2, 4, 8, 12, 24, 36, or 48 hours before) and after (e.g., at least 1, 2, 4, 8, 12, 24, 36, or 48 hours after) the cell is contacted with a gRNA molecule and/or a Cas9 molecule. In certain embodiments, the cell is contacted with the HSC self-renewal agonist about 2 hours before and about 24 hours after the cell is contacted with a gRNA molecule and/or a Cas9 molecule. In certain embodiments, the cell is contacted with the HSC self-renewal agonist at the same time the cell is contacted with a gRNA molecule and/or a Cas9 molecule. In certain embodiments, the HSC self-renewal agonist, e.g., UM171, is used at a concentration between 5 and 200 nM, e.g., between 10 and 100 nM or between 20 and 50 nM, e.g., about 40 nM.

[0135] The presently disclosed subject matter further provides for a cell or a population of cells produced (e.g., altered) by a method described herein.

[0136] The presently disclosed subject matter further provides for a method of treating a subject suffering from or likely to develop an HIV infection or AIDS, e.g., altering the structure, e.g., sequence, of a target nucleic acid of the subject, comprising contacting the subject (or a cell from the subject) with:

[0137] (a) a gRNA molecule that targets the CCR5 gene, e.g., a gRNA disclosed herein;

[0138] (b) a Cas9 molecule, e.g., a Cas9 molecule disclosed herein; and

[0139] optionally, (c)(i) a second gRNA molecule that targets the CCR5 gene, e.g., a second gRNA disclosed herein, and

[0140] further optionally, (c)(ii) a third gRNA molecule, and still further optionally, (c)(iii) a fourth gRNA molecule that target the CCR5 gene, e.g., a third and fourth gRNA disclosed herein.

[0141] In certain embodiments, contacting comprises contacting with (a) and (b). In certain embodiments, contacting comprises contacting with (a), (b), and (c)(i). In certain embodiments, contacting comprises contacting with (a), (b), (c)(i) and (c)(ii). In certain embodiments, contacting comprises contacting with (a), (b), (c)(i), (c)(ii) and (c)(iii). In certain embodiments, the method comprises acquiring knowledge of the presence or absence of a mutation at a CCR5 target position in said subject. In certain embodiments, the method comprises acquiring knowledge of the presence or absence of a mutation at a CCR5 target position in said subject by sequencing the CCR5 gene or a portion of the CCR5 gene. In certain embodiments, the method comprises introducing a mutation at a CCR5 target position. In certain embodiments, the method comprises introducing a mutation at a CCR5 target position, e.g., by NHEJ. When the method comprises introducing a mutation at a CCR5 target position, e.g., by NHEJ, in the coding region or a non-coding region, a Cas9 of (b) and at least one guide RNA (e.g., a guide RNA of (a)) are included in the contacting step.

[0142] In certain embodiments, a cell of the subject is contacted ex vivo with (a), (b) and optionally (c)(i), further optionally (c)(ii), and still further optionally (c)(iii). In certain embodiments, said cell is returned to the subject's body.

[0143] In certain embodiments, a cell of the subject is contacted is in vivo with (a), (b) and optionally (c)(i), further optionally (c)(ii), and still further optionally (c)(iii). In certain embodiments, the cell of the subject is contacted in vivo by intravenous delivery of (a), (b) and optionally (c)(i), further optionally (c)(ii), and still further optionally (c)(iii).

[0144] In certain embodiments, the method comprises contacting the subject with a nucleic acid composition, e.g., a vector (e.g., an AAV vector or an DLV vector), described herein, e.g., a nucleic acid composition that encodes at least one of (a), (b), and optionally (c)(i), further optionally (c)(ii), and still further optionally (c)(iii).

[0145] In certain embodiments, the method comprises delivering to said subject said Cas9 molecule of (b), as a protein or mRNA, and a nucleic acid composition that encodes (a) and optionally (c)(i), further optionally (c)(ii), and still further optionally (c)(iii).

[0146] In certain embodiments, the method comprises delivering to the subject the Cas9 molecule of (b), as a protein or mRNA, said gRNA molecule of (a), as an RNA, and optionally said second gRNA molecule of (c)(i), further optionally said third gRNA molecule of (c)(ii), and still further optionally said fourth gRNA molecule of (c)(iii), as an RNA.

[0147] In certain embodiments, the method comprises delivering to the subject the gRNA molecule of (a), as an RNA, optionally said second gRNA molecule of (c)(i), further optionally said third gRNA molecule of (c)(ii), and still further optionally said fourth gRNA molecule of (c)(iii), as an RNA, and a nucleic acid composition that encodes the Cas9 molecule of (b).

[0148] The presently disclosed subject matter also provides for a reaction mixture comprising a gRNA molecule, a nucleic acid composition, or a composition described herein, and a cell, e.g., a cell from a subject having, or likely to develop and HIV infection or AIDS, or a subject having a mutation at a CCR5 target position (e.g., a heterozygous carrier of a CCR5 mutation).

[0149] The presently disclosed subject matter also provides for a kit comprising, (a) a gRNA molecule described herein, or a nucleic acid composition that encodes the gRNA, and one or more of the following:

[0150] (b) a Cas9 molecule, e.g., a Cas9 molecule described herein, or a nucleic acid composition or mRNA that encodes the Cas9;

[0151] (c)(i) a second gRNA molecule, e.g., a second gRNA molecule described herein or a nucleic acid composition that encodes (c)(i);

[0152] (c)(ii) a third gRNA molecule, e.g., a third gRNA molecule described herein or a nucleic acid composition that encodes (c)(ii);

[0153] (c)(iii) a fourth gRNA molecule, e.g., a fourth gRNA molecule described herein or a nucleic acid composition that encodes (c)(iii).

[0154] In certain embodiments, the kit comprises a nucleic acid composition, e.g., an AAV vector, that encodes one or more of (a), (b), (c)(i), (c)(ii), and (c)(iii).

[0155] The presently disclosed subject matter further provides for a gRNA molecule, e.g., a gRNA molecule described herein, for use in treating, or delaying the onset or progression of, HIV infection or AIDS in a subject, e.g., in accordance with a method of treating, or delaying the onset or progression of, HIV infection or AIDS as described herein. In certain embodiments, the gRNA molecule in used in combination with a Cas9 molecule, e.g., a Cas9 molecule described herein. Additionaly or alternatively, in certain embodiments, the gRNA molecule is used in combination with a second, third and/or fouth gRNA molecule, e.g., a second, third and/or fouth gRNA molecule described herein.

[0156] The presently disclosed subject matter further provides for use of a gRNA molecule, e.g., a gRNA molecule described herein, in the manufacture of a medicament for treating, or delaying the onset or progression of, HIV infection or AIDS in a subject, e.g., in accordance with a method of treating, or delaying the onset or progression of, HIV infection or AIDS as described herein. In certain embodiments, the medicament comprises a Cas9 molecule, e.g., a Cas9 molecule described herein. Additionally or alternatively, in certain embodiments, the medicament comprises a second, third and/or fouth gRNA molecule, e.g., a second, third and/or fouth gRNA molecule described herein.

### Alteration of CXCR4

[0157] In certain embodiments, the methods, genome editing systems, and compositions discussed herein, inhibit or block a critical aspect of the HIV life cycle, i.e., CXCR4-mediated entry into T cells, i.e., CXCR4-mediated entry into B cells, by alteration (e.g., inactivation) of the CXCR4 gene. Exemplary mechanisms that can be associated with the alteration of the CXCR4 gene include, but are not limited to, non-homologous end joining (NHEJ) (e.g., classical or alternative), microhomology-mediated end joining (MMEJ), homology-directed repair (e.g., endogenous donor template mediated), SDSA (synthesis dependent strand annealing), single strand annealing or single strand invasion. Alteration of the CXCR4 gene, e.g., mediated by NHEJ, can result in a mutation (e.g. a single point mutation), which can comprise a deletion or insertion (indel). The introduced mutation can take place in any region of the CXCR4 gene, e.g., a promoter region or other non-coding region, or a coding region, so long as the mutation results in reduced or loss of the ability to mediate HIV entry into the cell.

[0158] In certain embodiments, the methods, genome editing systems, and compositions discussed herein are used to alter the CXCR4 gene to treat or prevent HIV infection or AIDS by targeting the coding sequence of the CXCR4 gene.

[0159] In certain embodiments, the gene, e.g., the coding sequence of the CXCR4 gene, is targeted for knocking out, e.g., to eliminate expression of the gene, e.g., to knock out both alleles of the CXCR4 gene, e.g., by introduction of an alteration comprising a mutation (e.g., a single point mutation, an insertion or a deletion) in the CXCR4 gene. This type of alteration is sometimes referred to as “knocking out” the CXCR4 gene. In certain embodiments, a targeted knockout approach is mediated by NHEJ using a CRISPR/Cas system comprising a Cas9 molecule, e.g., an enzymatically active Cas9 (eaCas9) molecule, as described herein.

[0160] In certain embodiments, the methods, genome editing systems, and compositions discussed herein are used to alter the CXCR4 gene to treat or prevent HIV infection or AIDS by targeting a non-coding sequence of the CXCR4 gene, e.g., a promoter, an enhancer, an intron, a 5′ UTR, a 3′UTR, and/or a polyadenylation signal.

[0161] In certain embodiments, the non-coding sequence of the CXCR4 gene is targeted for knocking out, e.g., to eliminate expression of the gene, e.g., to knock out both alleles of the CXCR4 gene, e.g., by introduction of an alteration comprising a mutation (e.g., a single point mutation, an insertion or/or a deletion) in the CXCR4 gene.

[0162] In certain embodiments, the method provides an alteration that comprises, e.g., a single point mutation, an insertion and/or a deletion. This type of alteration is also sometimes referred to as “knocking out” the CXCR4 gene. In certain embodiments, a targeted knockout approach is mediated by NHEJ using a CRISPR/Cas system comprising a Cas9 molecule, e.g., an enzymatically active Cas9 (eaCas9) molecule, as described herein.

[0163] In certain embodiments, the methods, genome editing systems, and compositions discussed herein, provide for knocking out the CXCR4 gene. In certain embodiments, knocking out the CXCR4 gene comprises (1) insertion or deletion (e.g., NHEJ-mediated insertion or deletion) of one or more nucleotides of the CXCR4 gene (e.g., in close proximity to or within an early coding region or in a non-coding region), and/or (2) deletion (e.g., NHEJ-mediated deletion) of a genomic sequence of the CXCR4 gene (e.g., in a coding region or in a non-coding region). Both approaches can give rise to alteration (e.g., knockout) of the CXCR4 gene as described herein. In certain embodiments, a CXCR4 target knockout position is altered by genome editing using the CRISPR/Cas9 system. The CXCR4 target knockout position can be targeted by cleaving with either one or more nucleases, or one or more nickases, or a combination thereof.

[0164] “CXCR4 target knockout position”, as used herein, refers to a position in the CXCR4 gene, which if altered, e.g., disrupted by insertion or deletion of one or more nucleotides, e.g., by NHEJ-mediated alteration, results in alteration of the CXCR4 gene. In certain embodiments, the position is in the CXCR4 coding region, e.g., an early coding region. In certain embodiments, the position is in a non-coding sequence of the CXCR4 gene, e.g., a promoter, an enhancer, an intron, a 5′ UTR, a 3′UTR, and/or a polyadenylation signal.

[0165] In certain embodiments, the CXCR4 gene is targeted for knocking down, e.g., to reduce or eliminate expression of the CXCR4 gene, e.g., to knock down one or both alleles of the CXCR4 gene.

[0166] In certain embodiments, the coding region of the CXCR4 gene is targeted to alter the expression of the gene. In certain embodiments, a non-coding region (e.g., an enhancer region, a promoter region, an intron, a 5′ UTR, a 3′UTR, or a polyadenylation signal) of the CXCR4 gene is targeted to alter the expression of the gene. In certain embodiments, the promoter region of the CXCR4 gene is targeted to knock down the expression of the CXCR4 gene. This type of alteration is also sometimes referred to as “knocking down” the CXCR4 gene. In certain embodiments, a targeted knockdown approach is mediated by a CRISPR/Cas system comprising a Cas9 molecule, e.g., an enzymatically inactive Cas9 (eiCas9) molecule or an eiCas9 fusion protein (e.g., an eiCas9 fused to a transcription repressor domain or chromatin modifying protein), as described herein. In certain embodiments, the CXCR4 gene is targeted to alter (e.g., to block, reduce, or decrease) the transcription of the CXCR4 gene. In certain embodiments, the CXCR4 gene is targeted to alter the chromatin structure (e.g., one or more histone and/or DNA modifications) of the CXCR4 gene. In certain embodiments, one or more gRNA molecules comprising a targeting domain are configured to target an enzymatically inactive Cas9 (eiCas9) molecule or an eiCas9 fusion protein (e.g., an eiCas9 fused to a transcription repressor domain), sufficiently close to a CXCR4 target knockdown position to reduce, decrease or repress expression of the CXCR4 gene.

[0167] “CXCR4 target knockdown position”, as used herein, refers to a position in the CXCR4 gene, which if targeted, e.g., by an eiCas9 molecule or an eiCas9 fusion described herein, results in reduction or elimination of expression of functional CXCR4 gene product. In certain embodiments, the transcription of the CXCR4 gene is reduced or eliminated. In certain embodiments, the chromatin structure of the CXCR4 gene is altered. In certain embodiments, the position is in the CXCR4 promoter sequence. In certain embodiments, a position in the promoter sequence of the CXCR4 gene is targeted by an enzymatically inactive Cas9 (eiCas9) molecule or an eiCas9 fusion protein, as described herein.

[0168] In certain embodiments, the methods, genome editing systems, and compositions discussed herein, provide for introduction of one or more mutations in the CXCR4 gene. In certain embodiments, the introduction is mediated by HDR. In certain embodiments, the one or more mutations comprise one or more single or two base substitutions. In certain embodiments, the one or more mutations disrupt HIV gp1230 binding to CXCR4.

[0169] “CXCR4 target position”, as used herein, refers to any position that results in inactivation of the CXCR4 gene. In certain embodiments, a CXCR4 target position comprises a CXCR4 target knockout position, a CXCR4 target knockdown position,or a position within the CXCR4 gene that is targeted for introduction of one or more mutations.

[0170] The presently disclosed subject matter provides for a gRNA molecule, e.g., an isolated or non-naturally occurring gRNA molecule, comprising a targeting domain which is complementary with a target domain (also referred to as “target sequence”) from the CXCR4 gene.

[0171] In certain embodiments, the targeting domain of the gRNA molecule is configured to provide a cleavage event, e.g., a double strand break or a single strand break, sufficiently close to a CXCR4 target position in the CXCR4 gene to allow alteration, e.g., alteration associated with NHEJ, of a CXCR4 target position in the CXCR4 gene. In certain embodiments, the alteration comprises an insertion or deletion. In certain embodiments, the targeting domain is configured such that a cleavage event, e.g., a double strand or single strand break, is positioned within 1, 2, 3, 4, 5, 10, 15, 20, 25, 30, 35, 40, 45, 50, 60, 70, 80, 90, 100, 150, 200, 300, 400, 450, or 500 nucleotides of a CXCR4 target position. The break, e.g., a double strand or single strand break, can be positioned upstream or downstream of a CXCR4 target position in the CXCR4 gene.

[0172] In certain embodiments, a second gRNA molecule comprising a second targeting domain is configured to provide a cleavage event, e.g., a double strand break or a single strand break, sufficiently close to the CXCR4 target position in the CXCR4 gene, to allow alteration, e.g., alteration associated with NHEJ, of the CXCR4 target position in the CXCR4 gene, either alone or in combination with the break positioned by said first gRNA molecule. In certain embodiments, the targeting domains of the first and second gRNA molecules are configured such that a cleavage event, e.g., a double strand or single strand break, is positioned, independently for each of the gRNA molecules, within 1, 2, 3, 4, 5, 10, 15, 20, 25, 30, 35, 40, 45, 50, 60, 70, 80, 90, 100, 150, 200, 300, 400, 450, or 500 nucleotides of the target position. In certain embodiments, the breaks, e.g., double strand or single strand breaks, are positioned on both sides of a nucleotide of a CXCR4 target position in the CXCR4 gene. In certain embodiments, the breaks, e.g., double strand or single strand breaks, are positioned on one side, e.g., upstream or downstream, of a nucleotide of a CXCR4 target position in the CXCR4 gene.

[0173] In certain embodiments, a single strand break is accompanied by an additional single strand break, positioned by a second gRNA molecule, as discussed below. For example, the targeting domains are configured such that a cleavage event, e.g., the two single strand breaks, are positioned within 1, 2, 3, 4, 5, 10, 15, 20, 25, 30, 35, 40, 45, 50, 60, 70, 80, 90, 100, 150, 200, 300, 400, 450, or 500 nucleotides of a CXCR4 target position. In certain embodiments, the first and second gRNA molecules are configured such, that when guiding a Cas9 molecule, e.g., a Cas9 nickase, a single strand break can be accompanied by an additional single strand break, positioned by a second gRNA, sufficiently close to one another to result in alteration of a CXCR4 target position in the CXCR4 gene. In certain embodiments, the first and second gRNA molecules are configured such that a single strand break positioned by said second gRNA is within 1, 2, 3, 4, 5, 10, 20, 30, 40, 50, 60, 70, 80, 90, 100, 200, 300, 400, 500, 600, 700, 800, 900, or 1000 nucleotides of the break positioned by said first gRNA molecule, e.g., when the Cas9 molecule is a nickase. In certain embodiments, the two gRNA molecules are configured to position cuts at the same position, or within a few nucleotides of one another, on different strands, e.g., essentially mimicking a double strand break.

[0174] In certain embodiments, a double strand break can be accompanied by an additional double strand break, positioned by a second gRNA molecule, as is discussed below. For example, the targeting domain of a first gRNA molecule is configured such that a double strand break is positioned upstream of a CXCR4 target position in the CXCR4 gene, e.g., within 1, 2, 3, 4, 5, 10, 15, 20, 25, 30, 35, 40, 45, 50, 60, 70, 80, 90, 100, 150, 200, 300, 400, 450, or 500 nucleotides of the target position; and the targeting domain of a second gRNA molecule is configured such that a double strand break is positioned downstream of a CXCR4 target position in the CXCR4 gene, e.g., within 1, 2, 3, 4, 5, 10, 15, 20, 25, 30, 35, 40, 45, 50, 60, 70, 80, 90, 100, 150, 200, 300, 400, 450, or 500 nucleotides of the target position. In certain embodiments, the first and second gRNA molecules are configured such that a double strand break positioned by said second gRNA is within 10, 20, 30, 40, 50, 60, 70, 80, 90, 100, 200, 300, 400, 500, 600, 700, 800, 900, or 1000 nucleotides of the break positioned by said first gRNA molecule.

[0175] In certain embodiments, the targeting domains of the first and second gRNA molecules are configured such that a cleavage event, e.g., a single strand break, is positioned, independently for each of the gRNA molecules.

[0176] In certain embodiments, a double strand break can be accompanied by two additional single strand breaks, positioned by a second gRNA molecule and a third gRNA molecule. For example, the targeting domain of a first gRNA molecule is configured such that a double strand break is positioned upstream of a CXCR4 target position in the CXCR4 gene, e.g., within 1, 2, 3, 4, 5, 10, 15, 20, 25, 30, 35, 40, 45, 50, 60, 70, 80, 90, 100, 150, 200, 300, 400, 450, or 500 nucleotides of the target position; and the targeting domains of a second and third gRNA molecule are configured such that two single strand breaks are positioned downstream of a CXCR4 target position in the CXCR4 gene, e.g., within 1, 2, 3, 4, 5, 10, 15, 20, 25, 30, 35, 40, 45, 50, 60, 70, 80, 90, 100, 150, 200, 300, 400, 450, or 500 nucleotides of the target position. In certain embodiments, the first, second and third gRNA molecules are configured such that a single strand break positioned by said second or third gRNA molecule is within 10, 20, 30, 40, 50, 60, 70, 80, 90, 100, 200, 300, 400, 500, 600, 700, 800, 900, or 1000 nucleotides of the break positioned by said first gRNA molecule. In certain embodiments, the targeting domains of the first, second and third gRNA molecules are configured such that a cleavage event, e.g., a double strand or single strand break, is positioned, independently for each of the gRNA molecules.

[0177] In certain embodiments, when CXCR4 is targeted for knock out, a first and second single strand breaks can be accompanied by two additional single strand breaks positioned by a third gRNA molecule and a fourth gRNA molecule. For example, the targeting domain of a first and second gRNA molecule are configured such that two single strand breaks are positioned upstream of a CXCR4 target position in the CXCR4 gene, e.g., within 1, 2, 3, 4, 5, 10, 15, 20, 25, 30, 35, 40, 45, 50, 60, 70, 80, 90, 100, 150, 200, 300, 400, 450, or 500 nucleotides of the target position; and the targeting domains of a third and fourth gRNA molecule are configured such that two single strand breaks are positioned downstream of a CXCR4 target position in the CXCR4 gene, e.g., within 1, 2, 3, 4, 5, 10, 15, 20, 25, 30, 35, 40, 45, 50, 60, 70, 80, 90, 100, 150, 200, 300, 400, 450, or 500 nucleotides of the target position. In certain embodiments, the first, second, third and fourth gRNA molecules are configured such that the single strand break positioned by said third or fourth gRNA molecule is within 10, 20, 30, 40, 50, 60, 70, 80, 90, 100, 200, 300, 400, 500, 600, 700, 800, 900, or 1000 nucleotides of the break positioned by said first or second gRNA molecule, e.g., when the Cas9 molecule is a nickase. In certain embodiments, the targeting domains of the first, second, third and fourth gRNA molecules are configured such that a cleavage event, e.g., a single strand break, is positioned, independently for each of the gRNA molecules.

[0178] In certain embodiments, when multiple gRNAs are used to generate (1) two single stranded breaks in close proximity, (2) two double stranded breaks, e.g., flanking a CXCR4 target position (e.g., to remove a piece of DNA, e.g., a insertion or deletion mutation) or to create more than one indel in an early coding region, (3) one double stranded break and two paired nicks flanking a CXCR4 target position (e.g., to remove a piece of DNA, e.g., a insertion or deletion mutation) or (4) four single stranded breaks, two on each side of a CXCR4 target position, that they are targeting the same CXCR4 target position. In certain embodiments multiple gRNAs may be used to target more than one target position in the same gene.

[0179] In certain embodiments, the targeting domain of the first gRNA molecule and the targeting domain of the second gRNA molecules are complementary to opposite strands of the target nucleic acid molecule. In certain embodiments, the gRNA molecule and the second gRNA molecule are configured such that the PAMs are oriented outward.

[0180] In certain embodiments, the targeting domain of a gRNA molecule is configured to avoid unwanted target chromosome elements, such as repeat elements, e.g., Alu repeats, in the target domain (also referred to as “target sequence”). The gRNA molecule may be a first, second, third and/or fourth gRNA molecule, as described herein.

[0181] In certain embodiments, the targeting domain of a gRNA molecule is configured to position a cleavage event sufficiently far from a preselected nucleotide, e.g., the nucleotide of a coding region, such that the nucleotide is not altered. In certain embodiments, the targeting domain of a gRNA molecule is configured to position an intronic cleavage event sufficiently far from an intron/exon border, or naturally occurring splice signal, to avoid alteration of the exonic sequence or unwanted splicing events. The gRNA molecule may be a first, second, third and/or fourth gRNA molecule, as described herein.

[0182] In certain embodiments, a CXCR4 target position is targeted and the targeting domain of a gRNA molecule comprises a nucleotide sequence that is the same as, or differs by no more than 1, 2, 3, 4, or 5 nucleotides from, a nucleotide sequence selected from SEQ ID NOS: 3740 to 8407. In certain embodiments, the targeting domain comprises a nucleotide sequence selected from SEQ ID NOS: 3740 to 8407. In certain embodiments, the targeting domain comprises a nucleotide sequence selected from SEQ ID NOS: 3740 to 5208 and 5241 to 8355. In certain embodiments, the targeting domain comprises a nucleotide sequence independently selected from:

(SEQ ID NO: 3740)

GUUGGUGGCGUGGACGA;

(SEQ ID NO: 3741)

UUGAUGCCGUGGCAAAC;

(SEQ ID NO: 3742)

GGAGGUCGGCCACUGAC;

(SEQ ID NO: 3743)

CAAUGGAUUGGUCAUCC;

(SEQ ID NO: 3744)

UGGUCUAUGUUGGCGUC;

(SEQ ID NO: 3745)

CGCAUCUGGAGAACCAG;

(SEQ ID NO: 3746)

UGGUUCUCCAGAUGCGG;

(SEQ ID NO: 3747)

ACGGCAUCAACUGCCCAGAA;

(SEQ ID NO: 3748)

CCCAAAGUACCAGUUUGCCA;

(SEQ ID NO: 3749)

UGGAUUGGUCAUCCUGGUCA;

(SEQ ID NO: 3750)

GAACCAGCGGUUACCAUGGA;

(SEQ ID NO: 3751)

GUAGCGGUCCAGACUGAUGA;

(SEQ ID NO: 3752)

CAGUUGAUGCCGUGGCAAAC;

(SEQ ID NO: 3753)

AGAGGAGGUCGGCCACUGAC;

(SEQ ID NO: 3754)

GAAGCAUGACGGACAAGUAC;

(SEQ ID NO: 3755)

UCUUCUGGUAACCCAUGACC;

(SEQ ID NO: 3756)

AUCCCCUCCAUGGUAACCGC;

(SEQ ID NO: 3757)

AGGUGGUCUAUGUUGGCGUC;

(SEQ ID NO: 3758)

UUGUCAUCACGCUUCCCUUC;

(SEQ ID NO: 3759)

CACCGCAUCUGGAGAACCAG;

(SEQ ID NO: 3760)

UCCACGCCACCAACAGUCAG;

(SEQ ID NO: 3761)

CACUUCAGAUAACUACACCG;

(SEQ ID NO: 3762)

CUUCUGGGCAGUUGAUGCCG;

(SEQ ID NO: 3763)

GCCUCUGACUGUUGGUGGCG;

(SEQ ID NO: 3764)

GAAGCGUGAUGACAAAGAGG;

(SEQ ID NO: 3765)

CGCUGGUUCUCCAGAUGCGG;

(SEQ ID NO: 3766)

AGAACCAGCGGUUACCAUGG;

(SEQ ID NO: 3767)

AACCGCUGGUUCUCCAGAUG;

(SEQ ID NO: 3768)

GGAUUGGUCAUCCUGGUCAU;

(SEQ ID NO: 3769)

UGUCAUCACGCUUCCCUUCU;

(SEQ ID NO: 3770)

GCUGAAAAGGUGGUCUAUGU;

(SEQ ID NO: 3771)

GCCGUGGCAAACUGGUACUU;
and

(SEQ ID NO: 3772)

CCGUGGCAAACUGGUACUUU.

[0183] In certain embodiments, when CXCR4 is targeted for knock out or knock down, more than one gRNA is used to position breaks, e.g., two single stranded breaks or two double stranded breaks, or a combination of single strand and double strand breaks, e.g., to create one or more indels, in the target nucleic acid sequence. In certain embodiments, two, three or four gRNA molecules are used to knockout or knockdown the CCR5 gene.

[0184] In certain embodiments, when CXCR4 is targeted for knock out or knock down, the targeting domain of the gRNA molecule is configured to target an enzymatically inactive Cas9 (eiCas9) molecule or an eiCas9 fusion protein (e.g., an eiCas9 fused to a transcription repressor domain), sufficiently close to a CXCR4 transcription start site (TSS) to reduce (e.g., block) transcription, e.g., transcription initiation or elongation, binding of one or more transcription enhancers or activators, and/or RNA polymerase. In certain embodiments, the targeting domain is configured to target between 1000 bp upstream and 1000 bp downstream (e.g., between 500 bp upstream and 1000 bp downstream, between 1000 bp upstream and 500 bp downstream, between 500 bp upstream and 500 bp downstream, within 500 bp or 200 bp upstream, or within 500 bp or 200 bp downstream) of the TSS of the CXCR4 gene. One or more gRNAs may be used to target an eiCas9 to the promoter region of the CXCR4 gene.

[0185] In certain embodiments, the CXCR4 gene is targeted for knockout, the targeting domain of the gRNA molecule can comprise a nucleotide sequence that is the same as, or differs by no more than 1, 2, 3, 4, or 5 nucleotides from, a nucleotide sequence selected from SEQ ID NOS: 3740 to 5240. In certain embodiments, the targeting domain comprises a nucleotide sequence selected from SEQ ID NOS: 3740 to 5240. In certain embodiments, the targeting domain comprises a nucleotide sequence selected from SEQ ID NOS: 3740 to 5208. In certain embodiments, the targeting domain comprises a nucleotide sequence selected from SEQ ID NOS: 3973, 4118, and 4604. In certain embodiments, the targeting domain comprises a nucleotide sequence selected from SEQ ID NOS: 3740 to 3772. In certain embodiments, the targeting domain comprises a nucleotide sequence selected from SEQ ID NOS: 4064 to 4125. In certain embodiments, the targeting domain comprises a nucleotide sequence selected from SEQ ID NOS: 5209 to 5219.

[0186] In certain embodiments, the CXCR4 gene is targeted for knockdown, and the targeting domain of the gRNA molecule can comprise a nucleotide sequence that is the same as, or differs by no more than 1, 2, 3, 4, or 5 nucleotides from, a nucleotide sequence selected from SEQ ID NOS: 5241 to 8407. In certain embodiments, the targeting domain comprises a nucleotide sequence selected from SEQ ID NOS: 5241 to 8407. In certain embodiments, the targeting domain comprises a nucleotide sequence selected from SEQ ID NOS: 5241 to 8355. In certain embodiments, the targeting domain comprises a nucleotide sequence selected from SEQ ID NOS: 5241 to 5349. In certain embodiments, the targeting domain comprises a nucleotide sequence selected from SEQ ID NOS: 5921 to 6046. In certain embodiments, the targeting domain comprises a nucleotide sequence selected from SEQ ID NOS: 8356 to 8377.

[0187] In certain embodiments, the CXCR4 target knockdown position is the promoter region of the CXCR4 gene. In certain embodiments, when the CXCR4 target knockdown position is the CXCR4 promoter region and more than one gRNA is used to position an eiCas9 molecule or an eiCas9-fusion protein (e.g., an eiCas9-transcription repressor domain fusion protein), in the target nucleic acid sequence, the targeting domain for each guide RNA comprises a nucleotide sequence selected from SEQ ID NOS: 5241 to 8407.

[0188] In certain embodiments, the targeting domain which is complementary with a target domain (also referred to as “target sequence”) from the CXCR4 target position in the CXCR4 gene is 16 nucleotides or more in length. In certain embodiments, the targeting domain is 16 nucleotides in length. In certain embodiments, the targeting domain is 17 nucleotides in length. In other embodiments, the targeting domain is 18 nucleotides in length. In still other embodiments, the targeting domain is 19 nucleotides in length. In still other embodiments, the targeting domain is 20 nucleotides in length. In certain embodiments, the targeting domain is 21 nucleotides in length. In certain embodiments, the targeting domain is 22 nucleotides in length. In certain embodiments, the targeting domain is 23 nucleotides in length. In certain embodiments, the targeting domain is 24 nucleotides in length. In certain embodiments, the targeting domain is 25 nucleotides in length. In certain embodiments, the targeting domain is 26 nucleotides in length.

[0189] In certain embodiments, the targeting domain comprises 16 nucleotides. In certain embodiments, the targeting domain comprises 17 nucleotides. In certain embodiments, the targeting domain comprises 18 nucleotides. In certain embodiments, the targeting domain comprises 19 nucleotides. In certain embodiments, the targeting domain comprises 20 nucleotides. In certain embodiments, the targeting domain comprises 21 nucleotides. In certain embodiments, the targeting domain comprises 22 nucleotides. In certain embodiments, the targeting domain comprises 23 nucleotides. In certain embodiments, the targeting domain comprises 24 nucleotides. In certain embodiments, the targeting domain comprises 25 nucleotides. In certain embodiments, the targeting domain comprises 26 nucleotides.

[0190] A gRNA as described herein may comprise from 5′ to 3′: a targeting domain (comprising a “core domain”, and optionally a “secondary domain”); a first complementarity domain; a linking domain; a second complementarity domain; a proximal domain; and a tail domain. In certain embodiments, the proximal domain and tail domain are taken together as a single domain.

[0191] In certain embodiments, a gRNA comprises a linking domain of no more than 25 nucleotides in length; a proximal and tail domain, that taken together, are at least 20, at least 25, at least 30, at least 35, or at least 40 nucleotides in length; and a targeting domain equal to or greater than 16, 17, 18, 19, 20, 21, 22, 23, 24, 25 or 26 nucleotides in length.

[0192] A cleavage event, e.g., a double strand or single strand break, is generated by a Cas9 molecule. The Cas9 molecule may be an enzymatically active Cas9 (eaCas9) molecule, e.g., an eaCas9 molecule that forms a double strand break in a target nucleic acid or an eaCas9 molecule forms a single strand break in a target nucleic acid (e.g., a nickase molecule).

[0193] In certain embodiments, the eaCas9 molecule catalyzes a double strand break.

[0194] In certain embodiments, the eaCas9 molecule comprises HNH-like domain cleavage activity but has no, or no significant, N-terminal RuvC-like domain cleavage activity. In this case, the eaCas9 molecule is an HNH-like domain nickase, e.g., the eaCas9 molecule comprises a mutation at D10, e.g., D10A. In other embodiments, the eaCas9 molecule comprises N-terminal RuvC-like domain cleavage activity but has no, or no significant, HNH-like domain cleavage activity. In certain embodiments, the eaCas9 molecule is an N-terminal RuvC-like domain nickase, e.g., the eaCas9 molecule comprises a mutation at H840, e.g., H840A. In certain embodiments, the eaCas9 molecule is an N-terminal RuvC-like domain nickase, e.g., the eaCas9 molecule comprises a mutation at N863, e.g., N863A. In certain embodiments, the eaCas9 molecule is an N-terminal RuvC-like domain nickase, e.g., the eaCas9 molecule comprises a mutation at N580, e.g., N580A.

[0195] In certain embodiments, a single strand break is formed in the strand of the target nucleic acid to which the targeting domain of said gRNA is complementary. In certain embodiments, a single strand break is formed in the strand of the target nucleic acid other than the strand to which the targeting domain of said gRNA is complementary.

[0196] The presently disclosed subject matter provides for a nucleic acid composition, e.g., an isolated or non-naturally occurring nucleic acid, e.g., DNA, that comprises (a) a first nucleotide equence that encodes a first gRNA molecule comprising a targeting domain that is complementary with a CXCR4 target position in the CXCR4 gene as disclosed herein.

[0197] In certain embodiments, the first gRNA molecule comprises a targeting domain configured to provide a cleavage event, e.g., a double strand break or a single strand break, sufficiently close to a CXCR4 target position in the CXCR4 gene to allow alteration, e.g., alteration associated with NHEJ, of a CXCR4 target position in the CXCR4 gene. In certain embodiments, the first gRNA molecule comprises a targeting domain configured to target an enzymatically inactive Cas9 (eiCas9) molecule or an eiCas9 fustion protein (e.g., an eiCas9 fused to a transcription repressor domain or chromatin modifying protein), sufficiently close to a CXCR4 knockdown target position to reduce, decrease or repress expression of the CXCR4 gene. In certain embodiments, the first gRNA molecule comprises a targeting domain comprising a nucleotide sequence that is the same as, or differs by no more than 1, 2, 3, 4, or 5 nucleotides from, a nucleotide sequence selected from SEQ ID NOS: 3740 to 8407, SEQ ID NOS: 3740 to 5240, or SEQ ID NOS: 5241 to 8407. In certain embodiments, the first gRNA molecule comprises a targeting domain that comprises a nucleotide sequence selected from SEQ ID NOS: 3740 to 8407, SEQ ID NOS: 3740 to 5240, or SEQ ID NOS: 5241 to 8407.

[0198] In certain embodiments, the nucleic acid composition further comprises (b) a second nucleotide sequence that encodes a Cas9 molecule.

[0199] In certain embodiments, the Cas9 molecule is a nickase molecule, an enzymatically active Cas9 (eaCas9) molecule, e.g., an eaCas9 molecule that forms a double strand break in a target nucleic acid and/or an eaCas9 molecule that forms a single strand break in a target nucleic acid. In certain embodiments, a single strand break is formed in the strand of the target nucleic acid to which the targeting domain of said gRNA is complementary. In certain embodiments, a single strand break is formed in the strand of the target nucleic acid other than the strand to which to which the targeting domain of said gRNA is complementary. In certain embodiments, the eaCas9 molecule catalyzes a double strand break.

[0200] In certain embodiments, the eaCas9 molecule comprises HNH-like domain cleavage activity but has no, or no significant, N-terminal RuvC-like domain cleavage activity. In certain embodiments, the said eaCas9 molecule is an HNH-like domain nickase, e.g., the eaCas9 molecule comprises a mutation at D10, e.g., D10A. In certain embodiments, the eaCas9 molecule comprises N-terminal RuvC-like domain cleavage activity but has no, or no significant, HNH-like domain cleavage activity. In certain embodiments, the eaCas9 molecule is an N-terminal RuvC-like domain nickase, e.g., the eaCas9 molecule comprises a mutation at H840, e.g., H840A. In certain embodiments, the eaCas9 molecule is an N-terminal RuvC-like domain nickase, e.g., the eaCas9 molecule comprises a mutation at N863, e.g., N863A. In certain embodiments, the eaCas9 molecule is an N-terminal RuvC-like domain nickase, e.g., the eaCas9 molecule comprises a mutation at N580, e.g., N580A.

[0201] In certain embodiments, the Cas9 molecule is an enzymatically active Cas9 (eaCas9) molecule. In certain embodiments, the Cas9 molecule is an enzymatically inactive Cas9 (eiCas9) molecule or a modified eiCas9 molecule, e.g., the eiCas9 molecule is fused to Kruppel-associated box (KRAB) to generate an eiCas9-KRAB fusion protein molecule.

[0202] In certain embodiments, the nucleic acid composition further comprises (c)(i) a third nucleotide sequence that encodes a second gRNA molecule described herein having a targeting domain that is complementary to a second target domain of the CXCR4 gene, and optionally, (c)(ii) a fourth nucleotide sequence that encodes a third gRNA molecule described herein having a targeting domain that is complementary to a third target domain of the CXCR4 gene; and optionally, (c)(iii) a fifth nucleotide sequence that encodes a fourth gRNA molecule described herein having a targeting domain that is complementary to a fourth target domain of the CXCR4 gene.

[0203] In certain embodiments, the second gRNA molecule comprises a targeting domain configured to provide a cleavage event, e.g., a double strand break or a single strand break, sufficiently close to a CXCR4 target position in the CXCR4 gene, to allow alteration, e.g., alteration associated with NHEJ, of a CXCR4 target position in the CXCR4 gene, either alone or in combination with the break positioned by said first gRNA molecule. In certain embodiments, the second gRNA molecule comprises a targeting domain configured to target an enzymatically inactive Cas9 (eiCas9) molecule or an eiCas9 fustion protein (e.g., an eiCas9 fused to a transcription repressor domain or chromatin modifying protein), sufficiently close to a CXCR4 knockdown target position to reduce, decrease or repress expression of the CXCR4 gene.

[0204] In certain embodiments, the third gRNA molecule comprises a targeting domain configured to provide a cleavage event, e.g., a double strand break or a single strand break, sufficiently close to a CXCR4 target position in the CXCR4 gene to allow alteration, e.g., alteration associated with NHEJ, of a CXCR4 target position in the CXCR4 gene, either alone or in combination with the break positioned by the first and/or second gRNA molecule.

[0205] In certain embodiments, the third gRNA molecule comprises a targeting domain configured to target an enzymatically inactive Cas9 (eiCas9) molecule or an eiCas9 fustion protein (e.g., an eiCas9 fused to a transcription repressor domain or chromatin remodeling protein), sufficiently close to a CXCR4 knockdown target position to reduce, decrease or repress expression of the CXCR4 gene.

[0206] In certain embodiments, the fourth gRNA molecule comprises a targeting domain configured to provide a cleavage event, e.g., a double strand break or a single strand break, sufficiently close to a CXCR4 target position in the CXCR4 gene to allow alteration, e.g., alteration associated with NHEJ, of a CXCR4 target position in the CXCR4 gene, either alone or in combination with the break positioned by the first gRNA molecule, the second gRNA molecule and/or the third gRNA molecule.

[0207] In certain embodiments, the second gRNA targets the same CXCR4 target position as the first gRNA molecule. In certain embodiments, the third gRNA molecule and the fourth gRNA molecule target the same CXCR4 target position as the first and second gRNA molecules.

[0208] In certain embodiments, the targeting domain of each of the second, third, and fourth gRNA molecules comprise a nucleotide sequence that is the same as, or differs by no more than 1, 2, 3, 4, or 5 nucleotides from, a nucleotide sequence selected from from SEQ ID NOS: 3740 to 8407, SEQ ID NOS: 3740 to 5240, or SEQ ID NOS: 5241 to 8407. In certain embodiments, the targeting domain of each of the second, third, and fourth gRNA molecules comprise a nucleotide sequence selected from from SEQ ID NOS: 3740 to 8407, SEQ ID NOS: 3740 to 5240, or SEQ ID NOS: 5241 to 8407.

[0209] When multiple gRNAs are used, any combination of modular or chimeric gRNAs may be used.

[0210] In certain embodiments, the first gRNA of (a) and the Cas9 molecule of (b) are present on one nucleic acid molecule, e.g., one vector, e.g., one viral vector, e.g., one AAV vector. In certain embodiments, the nucleic acid molecule is an AAV vector. Exemplary AAV vectors that may be used in any of the described compositions and methods include an AAV1 vector, a modified AAV1 vector, an AAV2 vector, a modified AAV2 vector, an AAV3 vector, an AAV4 vector, a modified AAV4 vector, an AAV5 vector, a modified AAV5 vector, a modified AAV3 vector, an AAV6 vector, a modified AAV6 vector, an AAV8 vector an AAV9 vector, an AAV.rh10 vector, a modified AAV.rh10 vector, an AAV.rh32/33 vector, a modified AAV.rh32/33 vector, an AAV.rh43 vector, a modified AAV.rh43 vector, an AAV.rh64R1 vector, and a modified AAV.rh64R1 vector. In certain embodiments, the nucleic acid molecule is a lentiviral vector, e.g., an IDLV vector.

[0211] In certain embodiments, (a) is present on a first nucleic acid molecule, e.g. a first vector, e.g., a first viral vector, e.g., a first AAV vector; and (b) is present on a second nucleic acid molecule, e.g., a second vector, e.g., a second vector, e.g., a second AAV vector. The first and second nucleic acid molecules may be AAV vectors.

[0212] In certain embodiments, the first gRNA molecule of (a), the Cas9 molecule of (b), the second gRNA molecule of (c)(i), optoinally the third gRNA molecule of (c)(ii) and the fourth gRNA molecule of (c)(iii) are present on one nucleic acid molecule, e.g., one vector, e.g., one viral vector, e.g., one AAV vector. In certain embodiments, the nucleic acid molecule is an AAV vector.

[0213] In certain embodiments, (a) and (c)(i) are present on different vectors. For example, (a) may be present on a first nucleic acid molecule, e.g. a first vector, e.g., a first viral vector, e.g., a first AAV vector; and (c)(i) may be present on a second nucleic acid molecule, e.g., a second vector, e.g., a second vector, e.g., a second AAV vector. In certain embodiments, the first and second nucleic acid molecules are AAV vectors.

[0214] In certain embodiments, each of (a), (b), and (c)(i) are present on one nucleic acid molecule, e.g., one vector, e.g., one viral vector, e.g., an AAV vector. In certain embodiments, the nucleic acid molecule is an AAV vector. In certain embodiments, one of (a), (b), and (c)(i) is encoded on a first nucleic acid molecule, e.g., a first vector, e.g., a first viral vector, e.g., a first AAV vector; and a second and third of (e), (f), and (g)(i) is encoded on a second nucleic acid molecule, e.g., a second vector, e.g., a second vector, e.g., a second AAV vector. The first and second nucleic acid molecule may be AAV vectors.

[0215] In certain embodiments, (a) is present on a first nucleic acid molecule, e.g., a first vector, e.g., a first viral vector, a first AAV vector; and (b) and (c)(i) are present on a second nucleic acid molecule, e.g., a second vector, e.g., a second vector, e.g., a second AAV vector. The first and second nucleic acid molecule may be AAV vectors.

[0216] In certain embodiments, (b) is present on a first nucleic acid molecule, e.g., a first vector, e.g., a first viral vector, e.g., a first AAV vector; and (a) and (c)(i) are present on a second nucleic acid molecule, e.g., a second vector, e.g., a second vector, e.g., a second AAV vector. The first and second nucleic acid molecule may be AAV vectors.

[0217] In certain embodiments, (c)(i) is present on a first nucleic acid molecule, e.g., a first vector, e.g., a first viral vector, e.g., a first AAV vector; and (a) and (b) are present on a second nucleic acid molecule, e.g., a second vector, e.g., a second vector, e.g., a second AAV vector. The first and second nucleic acid molecule may be AAV vectors.

[0218] In certain embodiments, each of (a), (b) and (c)(i) are present on different nucleic acid molecules, e.g., different vectors, e.g., different viral vectors, e.g., different AAV vector. For example, (a) may be on a first nucleic acid molecule, (b) on a second nucleic acid molecule, and (c)(i) on a third nucleic acid molecule. The first, second and third nucleic acid molecule may be AAV vectors.

[0219] In certain embodiments, when a third and/or fourth gRNA molecule are present, each of (a), (b), (c)(i), (c)(ii) and (c)(iii) may be present on the same nucleic acid molecule, e.g., the same vector, e.g., the same viral vector, e.g., an AAV vector. In certain embodiments, the nucleic acid molecule is an AAV vector. In an alternate embodiment, each of (a), (b), (c)(i), (c)(ii) and (c)(iii) may be present on the different nucleic acid molecules, e.g., different vectors, e.g., the different viral vectors, e.g., different AAV vectors. In a further embodiment, each of (a), (b), (c)(i), (c)(ii) and (c)(iii) may be present on more than one nucleic acid molecule, but fewer than five nucleic acid molecules, e.g., AAV vectors.

[0220] The nucleic acid composition may comprise a promoter operably linked to the first nucleotide sequence that encodes the first gRNA molecule of (a), e.g., a promoter described herein. The nucleic acid composition may further comprise a second promoter operably linked to the third nucleotide sequence that encodes the second gRNA molecule of (c)(i), e.g., a promoter described herein. The promoter and second promoter differ from one another. In certain embodiments, the promoter and second promoter are the same.

[0221] The nucleic acid composition described herein may further comprise a promoter operably linked to the second sequence that encodes the Cas9 molecule of (f), e.g., a promoter described herein.

[0222] The presently disclosed subject matter also provides for a composition comprising (a) a gRNA molecule comprising a targeting domain that is complementary with a target domain (also referred to as “target sequence”) in the CXCR4 gene, as described herein. The composition may further comprise (b) a Cas9 molecule, e.g., a Cas9 molecule as described herein. The composition may further comprise (c)(i) a second gRNA molecule, as described herein. The composition may further comprise (c)(ii) a third gRNA molecule, and (c)(iii) a fourth gRNA molecule, as described herein. In certain embodiments, the composition is a pharmaceutical composition. The compositions described herein, e.g., pharmaceutical compositions described herein, can be used in the treatment or prevention of HIV or AIDS in a subject, e.g., in accordance with a method disclosed herein.

[0223] The presently disclosed subject matter further provides for a method of altering a cell, e.g., altering the structure, e.g., altering the sequence, of a target nucleic acid of a cell, comprising contacting said cell with: (a) a gRNA that targets the CXCR4 gene, e.g., a gRNA as described herein; (b) a Cas9 molecule, e.g., a Cas9 molecule as described herein; and optionally, (c)(i) a second gRNA that targets CXCR4 gene, as described herein. In certain embodiments, the method comprises contacting said cell with (c)(ii) a third gRNA molecule, and (c)(iii) a fourth gRNA molecule, as described herein.

[0224] In certain embodiments, the method comprises contacting said cell with (a) and (b). In certain embodiments, the method comprises contacting said cell with (a), (b), and (c)(ii). In certain embodiments, the cell is from a subject suffering from or likely to develop an HIV infection or AIDS. The cell may be from a subject who does not have a mutation at a CXCR4 target position.

[0225] In certain embodiments, the cell being contacted in the disclosed method is a target cell from a circulating blood cell, a progenitor cell, or a stem cell, e.g., a hematopoietic stem cell (HSC) or a hematopoietic stem/progenitor cell (HSPC). In certain embodiments, the target cell is a T cell (e.g., a CD4+ T cell, a CD8+ T cell, a helper T cell, a regulatory T cell, a cytotoxic T cell, a memory T cell, a T cell precursor or a natural killer T cell), a B cell (e.g., a progenitor B cell, a Pre B cell, a Pro B cell, a memory B cell, a plasma B cell), a monocyte, a megakaryocyte, a neutrophil, an eosinophil, a basophil, a mast cell, a reticulocyte, a lymphoid progenitor cell, a myeloid progenitor cell, a hematopoietic stem cell, or a hematopoietic progenitor cell. In certain embodiments, the target cell is a bone marrow cell, (e.g., a lymphoid progenitor cell, a myeloid progenitor cell, an erythroid progenitor cell, a hematopoietic stem cell, a hematopoietic progenitor cell, an endothelial cell or a mesenchymal stem cell). In certain embodiments, the cell is a CD4 cell, a T cell, a gut associated lymphatic tissue (GALT), a macrophage, a dendritic cell, a myeloid precursor cell, or a microglial cell. The contacting may be performed ex vivo and the contacted cell may be returned to the subject's body after the contacting step. In certain embodiments, the contacting step may be performed in vivo.

[0226] In certain embodiments, the method of altering a cell as described herein comprises acquiring knowledge of the presence of a CXCR4 target position in said cell, prior to the contacting step. Acquiring knowledge of the presence of a CXCR4 target position in the cell may be by sequencing the CXCR4 gene, or a portion of the CXCR4 gene.

[0227] In certain embodiments, the method comprises contacting the cell with a nucleic acid composition, e.g., a vector, e.g., an AAV vector, that expresses at least one of (a), (b), and (c)(i). In certain embodiments, the method comprises contacting the cell with a nucleic acid composition, e.g., a vector, e.g., an AAV vector, that encodes each of (a), (b), and (c)(i). In certain embodiments, the method comprises delivering to the cell a Cas9 molecule of (f) and a nucleic acid composition that encodes a gRNA molecule of (a) and optionally, a second gRNA molecule of (c)(i) (and further optionally, a third gRNA molecule of (c)(ii) and/or fourth gRNA molecule of (c)(iii).

[0228] In certain embodiments, the method comprises contacting the cell with a nucleic acid composition, e.g., a vector. In certain embodiments, the vector is, an AAV vector, e.g., an AAV1 vector, a modified AAV1 vector, an AAV2 vector, a modified AAV2 vector, an AAV3 vector, a modified AAV3 vector, an AAV4 vector, a modified AAV4 vector, an AAV5 vector, a modified AAV5 vector, an AAV6 vector, a modified AAV6 vector, an AAV7 vector, a modified AAV7 vector, an AAV8 vector, an AAV9 vector, an AAV.rh10 vector, a modified AAV.rh10 vector, an AAV.rh32/33 vector, a modified AAV.rh32/33 vector, an AAV.rh43vector, a modified AAV.rh43vector, an AAV.rh64R1vector, or a modified AAV.rh64R1vector, as described herein. In certain embodiments, the vector is a lentiviral vector, e.g., an IDLV vector.

[0229] In certain embodiments, the method comprises delivering to the cell a Cas9 molecule of (b), as a protein or an mRNA, and a nucleic acid composition that encodes a gRNA molecule of (a) and optionally a second, third and/or fourth gRNA molecule of (c)(i), (c)(ii), and/or (c)(iii). In certain embodiments, the method comprises delivering to the cell a Cas9 molecule of (b), as a protein or an mRNA, said gRNA molecule of (a), as an RNA, and optionally said second, third and/or fourth gRNA molecule of(c)(i), (c)(ii), and/or (c)(iii), as an RNA. In certain embodiments, the method comprises delivering to the cell a gRNA molecule of (a) as an RNA, optionally the second, third and/or fourth gRNA molecule of (c)(i), (c)(ii), and/or (c)(iii) as an RNA, and a nucleic acid composition that encodes the Cas9 molecule of (b).

[0230] In certain embodiments, the contacting step further comprises contacting the cell with an HSC self-renewal agonist, e.g., UM171 (1r,4r)-N1-)2-benzyl-7-(2-methyl-2H-tetrazol-5-yl)-9H-pyrimido[4,5-b]indol-4-yl)cyclohexane-1,4-diamine) or a pyrimidoindole derivative described in Fares et at, Science, 2014. 345(6203): 1509-1512). In certain embodiments, the cell is contacted with the HSC self-renewal agonist before (e.g., at least 1, 2, 4, 8, 12, 24, 36, or 48 hours before, e.g., about 2 hours before) the cell is contacted with a gRNA molecule and/or a Cas9 molecule. In certain embodiments, the cell is contacted with the HSC self-renewal agonist after (e.g., at least 1, 2, 4, 8, 12, 24, 36, or 48 hours after, e.g., about 24 hours after) the cell is contacted with a gRNA molecule and/or a Cas9 molecule. In yet certain embodiments, the cell is contacted with the HSC self-renewal agonist before (e.g., at least 1, 2, 4, 8, 12, 24, 36, or 48 hours before) and after (e.g., at least 1, 2, 4, 8, 12, 24, 36, or 48 hours after) the cell is contacted with a gRNA molecule and/or a Cas9 molecule. In certain embodiments, the cell is contacted with the HSC self-renewal agonist about 2 hours before and about 24 hours after the cell is contacted with a gRNA molecule and/or a Cas9 molecule. In certain embodiments, the cell is contacted with the HSC self-renewal agonist at the same time the cell is contacted with a gRNA molecule and/or a Cas9 molecule. In certain embodiments, the HSC self-renewal agonist, e.g., UM171, is used at a concentration between 5 and 200 nM, e.g., between 10 and 100 nM or between 20 and 50 nM, e.g., about 40 nM.

[0231] The presently disclosed subject matter further provides for a cell or a population of cells produced (e.g., altered) by a method described herein.

[0232] The presently disclosed subject matter further provides for a method of treating a subject suffering from or likely to develop an HIV infection or AIDS, e.g., altering the structure, e.g., sequence, of a target nucleic acid of the subject, comprising contacting the subject (or a cell from the subject) with:

[0233] (a) a gRNA molecule that targets the CXCR4 gene, e.g., a gRNA disclosed herein;

[0234] (b) a Cas9 molecule, e.g., a Cas9 molecule disclosed herein; and

[0235] optionally, (c)(i) a second gRNA molecule that targets the CXCR4 gene, e.g., a second gRNA disclosed herein, and

[0236] further optionally, (c)(ii) a third gRNA, and still further optionally, (c)(iii) a fourth gRNA that target the CXCR4 gene, e.g., a third and fourth gRNA disclosed herein.

[0237] In certain embodiments, contacting comprises contacting with (a) and (b). In certain embodiments, contacting comprises contacting with (a), (b), and (c)(i). In certain embodiments, contacting comprises contacting with (a), (b), and (c)(i) and (c)(ii). In certain embodiments, contacting comprises contacting with (a), (b), and (c)(i), (c)(ii) and (c)(iii).

[0238] In certain embodiments, the method comprises acquiring knowledge of the presence or absence of a mutation at a CXCR4 target position in said subject. In certain embodiments, the method comprises acquiring knowledge of the presence or absence of a mutation at a CXCR4 target position in said subject by sequencing the CXCR4 gene or a portion of the CXCR4 gene. In certain embodiments, the method comprises introducing a mutation at a CXCR4 target position. In certain embodiments, the method comprises introducing a mutation at a CXCR4 target position by NHEJ. When the method comprises introducing a mutation at a CXCR4 target position, e.g., by NHEJ in the coding region or a non-coding region, a Cas9 of (b) and at least one guide RNA (e.g., a guide RNA of (a)) are included in the contacting step.

[0239] In certain embodiments, a cell of the subject is contacted ex vivo with (a), (b) and optionally (c)(i), further optionally (c)(ii), and still further optionally (c)(iii). In certain embodiments, said cell is returned to the subject's body.

[0240] In certain embodiments, a cell of the subject is contacted is in vivo with (a), (b) and optionally (c)(i), further optionally (c)(ii), and still further optionally (c)(iii). In certain embodiments, the cell of the subject is contacted in vivo by intravenous delivery of (e), (f) and optionally (g)(i), further optionally (c)(ii), and still further optionally (c)(iii).

[0241] In certain embodiments, the contacting step comprises contacting the subject with a nucleic acid, e.g., a vector, e.g., an AAV vector, described herein, e.g., a nucleic acid that encodes at least one of (a), (b) and optionally (c)(i), further optionally (c)(ii), and still further optionally (c)(iii).

[0242] In certain embodiments, the contacting step comprises delivering to said subject said Cas9 molecule of (b), as a protein or mRNA, and a nucleic acid which encodes (a) and optionally (c)(i), further optionally (g)(ii), and still further optionally (c)(iii).

[0243] In certain embodiments, the contacting step comprises delivering to the subject the Cas9 molecule of (b), as a protein or mRNA, said gRNA molecule of (a), as an RNA, and optionally said second gRNA molecule of (c)(i), further optionally said third gRNA molecule of (c)(ii), and still further optionally said fourth gRNA molecule of (c)(iii), as an RNA.

[0244] In certain embodiments, the contacting step comprises delivering to the subject the gRNA molecule of (a), as an RNA, optionally said second gRNA molecule of (c)(i), further optionally said third gRNA molecule of (c)(ii), and still further optionally said fourth gRNA molecule of (c)(iii), as an RNA, and a nucleic acid that encodes the Cas9 molecule of (b).

[0245] The presently disclosed subject matter further provides for a reaction mixture comprising a gRNA molecule, a nucleic acid, or a composition described herein, and a cell, e.g., a cell from a subject having, or likely to develop and HIV infection or AIDS, or a subject having a mutation at a CXCR4 target position (e.g., a heterozygous carrier of a CXCR4 mutation).

[0246] The presently disclosed subject matter further provides for a kit comprising, (a) a gRNA molecule described herein, or a nucleic acid that encodes the gRNA, and one or more of the following:

[0247] (b) a Cas9 molecule, e.g., a Cas9 molecule described herein, or a nucleic acid or mRNA that encodes the Cas9;

[0248] (c)(i) a second gRNA molecule, e.g., a second gRNA molecule described herein or a nucleic acid that encodes (c)(i);

[0249] (c)(ii) a third gRNA molecule, e.g., a third gRNA molecule described herein or a nucleic acid that encodes (c)(ii);

[0250] (c)(iii) a fourth gRNA molecule, e.g., a fourth gRNA molecule described herein or a nucleic acid that encodes (c)(iii).

[0251] In certain embodiments, the kit comprises a nucleic acid, e.g., an AAV vector, that encodes one or more of (a), (b), (c)(i), (c)(ii), and (c)(iii).

[0252] The presently disclosed subject matter further provides for a gRNA molecule, e.g., a gRNA molecule described herein, for use in treating, or delaying the onset or progression of, HIV infection or AIDS in a subject, e.g., in accordance with a method of treating, or delaying the onset or progression of, HIV infection or AIDS as described herein. In certain embodiments, the gRNA molecule in used in combination with a Cas9 molecule, e.g., a Cas9 molecule described herein. Additionaly or alternatively, in certain embodiments, the gRNA molecule is used in combination with a second, third and/or fouth gRNA molecule, e.g., a second, third and/or fouth gRNA molecule described herein.

[0253] The presently disclosed subject matter further provides for use of a gRNA molecule, e.g., a gRNA molecule described herein, in the manufacture of a medicament for treating, or delaying the onset or progression of, HIV infection or AIDS in a subject, e.g., in accordance with a method of treating, or delaying the onset or progression of, HIV infection or AIDS as described herein. In certain embodiments, the medicament comprises a Cas9 molecule, e.g., a Cas9 molecule described herein. Additionally or alternatively, in certain embodiments, the medicament comprises a second, third and/or fouth gRNA molecule, e.g., a second, third and/or fouth gRNA molecule described herein.

### Alteration of CCR5 and CXCR4

[0254] In certain embodiments, the methods, genome editing systems, and compositions discussed herein, inhibit or block critical aspects of the HIV life cycle, i.e., CCR5 and CXCR4-mediated entry into T cells, i.e., CCR5 and CXCR4-mediated entry into B cells, by alteringboth CCR5 gene and the CXCR4 gene. Exemplary mechanisms that can be associated with the alteration of the CCR5 gene and the CXCR4 gene include, but are not limited to, non-homologous end joining (NHEJ) (e.g., classical or alternative), microhomology-mediated end joining (MMEJ), homology-directed repair (e.g., endogenous donor template mediated), SDSA (synthesis dependent strand annealing), single strand annealing or single strand invasion. Alteration of both the CCR5 gene and the CXCR4 gene, e.g., mediated by NHEJ, can result in mutations, which typically comprise a deletion or insertion (indel). The introduced mutations can take place in any region of the CCR5 gene and in any region of the CXCR4 gene, e.g., a non-coding region (e.g., a promoter region, an enhancer region, a promoter region, an intron, a 5′ UTR, a 3′UTR, or a polyadenylation signal), or a coding region. In certain embodiments, the mutations result in reduced or loss of the ability to mediate HIV entry into the cell.

[0255] In certain embodiments, the methods, genome editing systems, and compositions discussed herein may be used to alter both the CCR5 gene and the CXCR4 gene to treat or prevent HIV infection or AIDS by targeting the coding sequences of both the CCR5 gene and the CXCR4 gene.

[0256] The methods, genome editing systems, and compositions described herein that alter the CCR5 gene, e.g., knock out, knock down or introduce one or more mutations (e.g., one or more protective mutations) in the CCR5 gene can be combined with the methods, genome editing systems, and compositions described herein that alter the CXCR4 gene, e.g., knock out, knock down or introduce one or more mutations (e.g., one or more single or two base substitutions) in the CXCR4 gene. In certain embodiments, both the CCR5 gene and the CXCR4 gene are knocked out. In certain embodiments, both the CCR5 gene and the CXCR4 gene are knocked down. In certain embodiments, the CCR5 gene is knocked down and the CXCR4 gene is knocked out. In certain embodiments, the CCR5 gene is knocked out and the CXCR4 gene is knocked down. In certain embodiments, one or more mutations (e.g., one or more protective mutations) are introduced in the CCR5 gene and the CXCR4 gene is knocked out. In certain embodiments, one or more mutations (e.g., one or more protective mutations) are introduced in the CCR5 gene and the CXCR4 gene is knocked down. In certain embodiments, one or more mutations (e.g., one or more single or two base substitutions) are introduced in the CXCR4 gene and the CCR5 gene is knocked out. In certain embodiments, one or more mutations (e.g., one or more single or two base substitutions) are introduced in the CXCR4 gene and the CCR5 gene is knocked down. In certain embodiments, one or more mutations (e.g., one or more protective mutations) are induced in the CCR5 gene and one or more mutations (e.g., one or more single or two base substitutions) are introduced in the CXCR4 gene.

[0257] In certain embodiments, knock out of both CCR5 and CXCR4 prevents and/or treats HIV infection or AIDS. In certain embodiments, knockdown of both CCR5 and CXCR4 prevents and/or treats HIV infection or AIDS. In certain embodiments, knockout of CCR5 and knockdown of CXCR4 prevent and/or treat HIV infection or AIDS. In certain embodiments, knockdown of CCR5 and knock out of CXCR4 prevent and/or treat HIV infection or AIDS. In certain embodiments, introduction of one or more mutations (e.g., one or more protective mutations) in the CCR5 gene and knockout of CXCR4 prevent and/or treat HIV infection or AIDS. In certain embodiments, introduction of one or more mutations (e.g., one or more protective mutations) in the CCR5 gene and knockdown of CXCR4 prevent and/or treat HIV infection or AIDS. In certain embodiments, introduction of one or more mutations (e.g., one or more single or two base substitutions) in the CXCR4 gene and knockout of CCR5 prevent and/or treat HIV infection or AIDS. In certain embodiments, introduction of one or more mutations (e.g., one or more single or two base substitutions) in the CXCR4 gene and knockdown of CCR5 prevent and/or treat HIV infection or AIDS. In certain embodiments, introduction of one or more mutations (e.g., one or more single or two base substitutions) in the CXCR4 gene and introduction of one or more mutations (e.g., one or more protective mutations) in the CCR5 gene prevent and/or treat HIV infection or AIDS. Introduction of the one or more mutations in the CCR5 gene and/or the CXCR4 gene can be done by co-delivery of an oligonucleotide donor (e.g., a donor DNA repair template) that encodes regions of homology proximal to the targeted mutation site(s) and encodes the specific mutation(s). The donor DNA repair template can be delivered in the context of a single strand deoxynucleotide donor (ssODN), a double strand deoxynucletide donor, or a viral vector (e.g., AAV or IDLV).

[0258] In certain embodiments, the genes, e.g., the coding sequence of the CCR5 gene and the coding sequence of the CXCR4 gene, are targeted to knock out the genes, e.g., to reduce or eliminate expression of the genes, e.g., to knock out both alleles of the CCR5 gene and the CXCR4 gene, e.g., by introducing an alteration comprising a mutation (e.g., a single point mutation, an insertion and/or a deletion) in both the CCR5 gene and the CXCR4 gene. This type of alteration is sometimes referred to as “knocking out” both the CCR5 gene and the CXCR4 gene. In certain embodiments, a targeted knockout approach is mediated by NHEJ using a CRISPR/Cas system comprising a Cas9 molecule, e.g., an enzymatically active Cas9 (eaCas9) molecule, as described herein.

[0259] When two or more genes (e.g., CCR5 and CXCR4) are targeted for alteration, the two or more genes (e.g., CCR5 and CXCR4) can be altered sequentially or simultaneously. In certain embodiments, the CCR5 gene and the CXCR4 gene are altered simultaneously. In certain embodiments, the CCR5 gene and the CXCR4 gene are altered sequentially. In certain embodiments, the alteration of the CXCR4 gene is prior to the alteration of the CCR5 gene. In certain embodiments, the alteration of the CXCR4 gene is concurrent with the alteration of the CCR5 gene. In certain embodiments, the alteration of the CXCR4 gene is subsequent to the alteration of the CCR5 gene. In certain embodiments, the effect of the alterations is synergistic. In certain embodiments, the two or more genes (e.g., CCR5 and CXCR4) are altered sequentially in order to reduce the probability of introducing genomic rearrangements (e.g., translocations) involving the two target positions.

[0260] In another aspect, the methods, genome editing systems, and compositions discussed herein are used to alter both the CCR5 gene and the CXCR4 gene to treat or prevent HIV infection or AIDS by targeting a non-coding sequence of the CCR5 gene and by targeting a non-coding sequence of the CXCR4 gene, e.g., a promoter, an enhancer, an intron, a 3′UTR, and/or a polyadenylation signal.

[0261] In certain embodiments, two distinct gRNA molecules are used to target two target positions, e.g., a CCR5 target position and a CXCR4 target position in two genes, e.g., the CCR5 gene and the CXCR4 gene. In certain embodiments, three or more distinct gRNA molecules are used to target two target positions, e.g., a CCR5 target position and a CXCR4 target position in two genes, e.g., the CCR5 gene and the CXCR4 gene. In certain embodiments, three or more distinct gRNA molecules are used to target three or more distinct target positions in two genes, e.g., the CCR5 gene and the CXCR4 gene.

[0262] In certain embodiments, the genome editing systems or compositions described herein comprise a first gRNA molecule comprising a first targeting domain that is complementary with a target domain (also referred to as “target sequence”) of a CCR5 gene, wherein the first targeting domain comprises a nucleotide sequence selected from SEQ ID NOS: 208 to 3739 and a second gRNA molecule comprising a second targeting domain that is complementary with a target domain (also referred to as “target sequence”) of a CXCR4 gene, wherein the second targeting domain comprises a nucleotide sequence selected from SEQ ID NOS: 3740 to 8407.

[0263] In certain embodiments, the first targeting domain comprises a nucleotide sequence selected from SEQ ID NOS: 208 to 1569, and 1614 to 3663, and the second targeting domain comprises a nucleotide sequence selected from SEQ ID NO: SEQ ID NOS: 3740 to 5208, and 5241 to 8355.

[0264] In certain embodiments, the first targeting domain comprises a nucleotide sequence selected from SEQ ID NOS: 335, 480, 482, 486, 488, 490, 492, 512, 521, 535, 1000, and 1002, and the second targeting domain comprises a nucleotide sequence selected from SEQ ID NO: 3973, 4118, and 4604.

[0265] In Certain Embodiments, the First Targeting Domain and the Second Targeting Domain are Selected from the Group Consisting of:

[0266] (a) a first targeting domain comprising the nucleotide sequence set forth in SEQ ID NO: 335, and a second targeting domain comprising the nucleotide sequence set forth in SEQ ID NO: 3973;

[0267] (b) a first targeting domain comprising the nucleotide sequence set forth in SEQ ID NO: 335, and a second targeting domain comprising the nucleotide sequence set forth in SEQ ID NO: 4604;

[0268] (c) a first targeting domain comprising the nucleotide sequence set forth in SEQ ID NO: 488, and a second targeting domain comprising the nucleotide sequence set forth in SEQ ID NO: 4604; and

[0269] (d) a first targeting domain comprising the nucleotide sequence set forth in SEQ ID NO: 480, and a second targeting domain comprising the nucleotide sequence set forth in SEQ ID NO: 4118.

[0270] In certain embodiments, a nucleic acid composition comprises (a) a nucleotide sequence that encodes a gRNA molecule e.g., the first gRNA molecule, comprising a targeting domain that is complementary with a target domain (also referred to as “target sequence”) in the CCR5 gene as disclosed herein, and further comprising (e) a nucleotide sequence that encodes a gRNA molecule e.g., the second gRNA molecule, comprising a targeting domain that is complementary with a target domain (also referred to as “target sequence”) in the CXCR4 gene as disclosed herein, and further comprising (b) a nucleotide sequence that encodes a Cas9 molecule.

[0271] In certain embodiments, a nucleic acid composition comprises (a) a nucleotide sequence that encodes a gRNA molecule e.g., the first gRNA molecule, comprising a targeting domain that is complementary with a target domain (also referred to as “target sequence”) in the CCR5 gene as disclosed herein, and further comprising (e) a nucleotide sequence that encodes a gRNA molecule e.g., the second gRNA molecule, comprising a targeting domain that is complementary with a target domain (also referred to as “target sequence”) in the CXCR4 gene as disclosed herein, and further comprising (b) a nucleotide sequence that encodes a Cas9 molecule specific for the CCR5 target position, and further comprising (f) a nucleotide sequence that encodes a second Cas9 molecule specific for the CXCR4 target position.

[0272] In certain embodiments, the at least one Cas9 molecule is an S. pyogenes Cas9 molecule or an S. aureus Cas9 molecule. In certain embodiments, the at least one Cas9 molecule comprises an S. pyogenes Cas9 molecule and an S. aureus Cas9 molecule. In certain embodiments, the at least one Cas9 molecule comprises a wild-type Cas9 molecule, a mutant Cas9 molecule, or a combination thereof. In certain embodiments, the mutant Cas9 molecule comprises a D10A mutation.

[0273] A nucleic acid composition disclosed herein may comprise (a) a sequence that encodes a first gRNA molecule comprising a targeting domain that is complementary with a target domain in the CCR5 gene as disclosed herein; (e) a sequence that encodes a second gRNA molecule e.g., the second gRNA molecule, comprising a targeting domain that is complementary with a target domain in the CXCR4 gene as disclosed herein; (b) a sequence that encodes a Cas9 molecule; and further may comprise (c)(i) a sequence that encodes a third gRNA molecule described herein having a targeting domain that is complementary to a second target domain of the CCR5 gene, and optionally, (g)(i) a sequence that encodes a fourth gRNA molecule described herein having a targeting domain that is complementary to a second target domain of the CXCR4 gene, and optionally, (c)(ii) a sequence that encodes a fifth gRNA molecule described herein having a targeting domain that is complementary to a third target domain of the CCR5 gene, and optionally, (g)(ii) a sequence that encodes a sixth gRNA molecule described herein having a targeting domain that is complementary to a third target domain of the CXCR4 gene; and optionally, (c)(iii) a sequence that encodes a seventh gRNA molecule described herein having a targeting domain that is complementary to a fourth target domain of the CCR5 gene, and optionally, (g)(iii) a sequence that encodes an eighth gRNA molecule described herein having a targeting domain that is complementary to a fourth target domain of the CXCR4 gene.

[0274] In certain embodiments, the first, third, fifth and seventh gRNA molecules comprising a CCR5 targeting domain correspond to the first, second, third and fourth gRNAs, respectively, described herein, e.g., described in the section “Alteration of CCR5”. In certain embodiments, the second, fourth, sixth and eighth gRNA molecules comprising a CXCR4 targeting domain correspond to the first, second, third and fourth gRNAs, respectively, described herein, e.g., described in the section “Alteration of CXCR4”.

[0275] In certain embodiments, a nucleic acid composition encodes (a) a first nucleotide sequence that encodes a first gRNA molecule comprising a targeting domain that is complementary with a target domain in the CCR5 gene as disclosed herein, and (b) a second nucleotide sequence that encodes a second gRNA molecule comprising a targeting domain that is complementary with a target domain in the CXCR4 gene as disclosed herein, and (c) a third nucleotide sequence that encodes a Cas9 molecule or molecules, e.g., a Cas9 molecule described herein. In certain embodiments, (a), (b) and (c) are present on one nucleic acid molecule, e.g., one vector, e.g., one viral vector, e.g., one AAV vector. In certain embodiments, the nucleic acid molecule is an AAV vector. Exemplary AAV vectors that may be used in any of the described compositions and methods include an AAV1 vector, a modified AAV1 vector, an AAV2 vector, a modified AAV2 vector, an AAV3 vector, an AAV4 vector, a modified AAV4 vector, an AAV5 vector, a modified AAV5 vector, a modified AAV3 vector, an AAV6 vector, a modified AAV6 vector, an AAV8 vector an AAV9 vector, an AAV.rh10 vector, a modified AAV.rh10 vector, an AAV.rh32/33 vector, a modified AAV.rh32/33 vector, an AAV.rh43 vector, a modified AAV.rh43 vector, an AAV.rh64R1 vector, and a modified AAV.rh64R1 vector. In certain embodiments, the nucleic acid molecule is a lentiviral vector, e.g., an DLV (integration deficienct lentivirus vector).

[0276] In certain embodiments, (a) and (b) are present on a first nucleic acid molecule, e.g. a first vector, e.g., a first viral vector, e.g., a first AAV vector; and (c) is present on a second nucleic acid molecule, e.g., a second vector, e.g., a second vector, e.g., a second AAV vector. The first and second nucleic acid molecules may be AAV vectors.

[0277] In certain embodiments, (a) is present on a first nucleic acid molecule, e.g. a first vector, e.g., a first viral vector, e.g., a first AAV vector; and (b) is present on a second nucleic acid molecule, e.g., a second vector, e.g., a second vector, e.g., a second AAV vector; and (c) is present on a third nucleic acid molecule, e.g., a third vector, e.g., a third vector, e.g., a third AAV vector. The first and second and third nucleic acid molecules may be AAV vectors.

[0278] In certain embodiments, the nucleic acid composition further comprises (d) a fourth nucleotide sequence that encodes a third gRNA molecule comprising a targeting domain that is complementary to a second target domain of the CCR5 gene. In certain embodiments, the nucleic acid composition further comprises (e) a fifth nucleotide sequence that encodes a fourth gRNA molecule comprising a targeting domain that is complementary to a third target domain of the CCR5 gene. In certain embodiments, the nucleic acid composition further comprises (f) a sixth nucleotide sequence that encodes a fifth gRNA molecule comprising a targeting domain that is complementary to a fourth target domain of the CCR5 gene.

[0279] In certain embodiments, the nucleic acid composition further comprises (g) a seventh nucleotide sequence that encodes a sixth gRNA molecule comprising a targeting domain that is complementary to a second target domain of the CXCR4 gene. In certain embodiments, the nucleic acid composition further comprises (h) an eighth nucleotide sequence that encodes a seventh gRNA molecule comprising a targeting domain that is complementary to a third target domain of the CXCR4 gene. In certain embodiments, the nucleic acid composition further comprises (i) a ninth nucleotide sequence that encodes an eighth gRNA molecule comprising a targeting domain that is complementary to a fourth target domain of the CXCR4 gene.

[0280] Each of (a) to (i) may be present on the same or different nucleic acid molecule(s), e.g., vector (s), e.g., viral vector(s), e.g., AAV vector(s).

[0281] The presently disclosed subject matter further provides for a composition comprising (a) a first gRNA molecule comprising a targeting domain that is complementary with a target domain in the CCR5 gene, and (b) a second gRNA molecule comprising a targeting domain that is complementary with a target domain in the CXCR4 gene, as described herein. The composition may further comprise (c) a Cas9 molecule or molecules, e.g., a Cas9 molecule as described herein. The composition may further comprise a third, fourth, fifth, sixth, seventh, and/or eighth gRNA molecules. The compositions described herein, e.g., pharmaceutical compositions described herein, can be used in the treatment or prevention of HIV or AIDS in a subject, e.g., in accordance with a method disclosed herein.

[0282] The presently disclosed subject matter further provides for a method of altering a cell, e.g., altering the structure, e.g., altering the sequence, of a target nucleic acid of a cell, comprising contacting said cell with: (a) a first gRNA molecule that targets the CCR5 gene, e.g., a gRNA molecule as described herein; (b) a second gRNA molecule that targets the CXCR4 gene, e.g., a gRNA molecule as described herein; (c) a Cas9 molecule or molecules, e.g., a Cas9 molecule as described herein. In certain embodiments, the method comprises contacting the cell with a third gRNA molecule, optionally a fourth gRNA molecule and/or a fifth gRNA molecule, each of which targets the CCR5 gene. In certain embodiments, the method comprises contacting the cell with a sixth gRNA molecule, optionally a seventh gRNA molecule and/or an eighth gRNA molecule, each of which targets the CXCR4 gene.

[0283] In certain embodiments, the method comprises contacting a cell from a subject suffering from or likely to develop an HIV infection or AIDS. The cell may be from a subject who does not have a mutation at a CCR5 target position.

[0284] In certain embodiments, the cell being contacted in the disclosed method is a target cell from a circulating blood cell, a progenitor cell, or a stem cell, e.g., a hematopoietic stem cell (HSC) or a hematopoietic stem/progenitor cell (HSPC). In certain embodiments, the target cell is a T cell (e.g., a CD4+ T cell, a CD8+ T cell, a helper T cell, a regulatory T cell, a cytotoxic T cell, a memory T cell, a T cell precursor or a natural killer T cell), a B cell (e.g., a progenitor B cell, a Pre B cell, a Pro B cell, a memory B cell, a plasma B cell), a monocyte, a megakaryocyte, a neutrophil, an eosinophil, a basophil, a mast cell, a reticulocyte, a lymphoid progenitor cell, a myeloid progenitor cell, or a hematopoietic stem cell. In certain embodiments, the target cell is a bone marrow cell, (e.g., a lymphoid progenitor cell, a myeloid progenitor cell, an erythroid progenitor cell, a hematopoietic stem cell, or a mesenchymal stem cell). In certain embodiments, the cell is a CD4 cell, a T cell, a gut associated lymphatic tissue (GALT), a macrophage, a dendritic cell, a myeloid precursor cell, or a microglial cell. The contacting may be performed ex vivo and the contacted cell may be returned to the subject's body after the contacting step. In certain embodiments, the contacting step may be performed in vivo.

[0285] In certain embodiments, the method of altering a cell as described herein comprises acquiring knowledge of the presence of a CCR5 target position in said cell, prior to the contacting step. Acquiring knowledge of the presence of a CCR5 target position in the cell may be by sequencing the CCR5 gene, or a portion of the CCR5 gene. In certain embodiments, the method of altering a cell as described herein comprises acquiring knowledge of the presence of a CXCR4 target position in said cell, prior to the contacting step. Acquiring knowledge of the presence of a CXCR4 target position in the cell may be by sequencing the CXCR4 gene, or a portion of the CXCR4 gene.

[0286] In certain embodiments, the method comprises delivering to the cell a Cas9 molecule or molecules of (c), as a protein or an mRNA, and a nucleic acid composition that encodes a first gRNA molecule of (a) and a second gRNA molecule of (b) and optionally a third, fourth, and/or fifth gRNA molecule and optionally a sixth, seventh, and/or eighth gRNA molecule.

[0287] In certain embodiments, the method delivering to the cell a Cas9 molecule or molecules of (c), as a protein or an mRNA, said gRNAs of (a) and (b), as an RNA, and optionally said third, fourth, and/or fifth gRNA molecule, as an RNA, and optionally said sixth, seventh, and/or eighth gRNA molecule, as an RNA.

[0288] In certain embodiments, the method comprises delivering to the cell a first gRNA molecule of (a) as an RNA, a second gRNA molecule of (b) as an RNA, and optionally the third, fourth, and/or fifth gRNA molecule as an RNA, and optionally the sixth, seventh, and/or eighth gRNA molecule, as an RNA, and a nucleic acid composition that encodes the Cas9 molecule or molecules of (c).

[0289] In certain embodiments, the method further comprises contacting the cell with an HSC self-renewal agonist, e.g., UM171 ((1r,4r)-N1-(2-benzyl-7-(2-methyl-2H-tetrazol-5-yl)-9H-pyrimido[4,5-b]indol-4-yl)cyclohexane-1,4-diamine) or a pyrimidoindole derivative described in Fares et al., Science, 2014, 345(6203): 1509-1512). In certain embodiments, the cell is contacted with the HSC self-renewal agonist before (e.g., at least 1, 2, 4, 8, 12, 24, 36, or 48 hours before, e.g., about 2 hours before) the cell is contacted with a gRNA molecule and/or a Cas9 molecule. In certain embodiments, the cell is contacted with the HSC self-renewal agonist after (e.g., at least 1, 2, 4, 8, 12, 24, 36, or 48 hours after, e.g., about 24 hours after) the cell is contacted with a gRNA molecule and/or a Cas9 molecule. In yet certain embodiments, the cell is contacted with the HSC self-renewal agonist before (e.g., at least 1, 2, 4, 8, 12, 24, 36, or 48 hours before) and after (e.g., at least 1, 2, 4, 8, 12, 24, 36, or 48 hours after) the cell is contacted with a gRNA molecule and/or a Cas9 molecule. In certain embodiments, the cell is contacted with the HSC self-renewal agonist about 2 hours before and about 24 hours after the cell is contacted with a gRNA molecule and/or a Cas9 molecule. In certain embodiments, the cell is contacted with the HSC self-renewal agonist at the same time the cell is contacted with a gRNA molecule and/or a Cas9 molecule. In certain embodiments, the HSC self-renewal agonist, e.g., UM171, is used at a concentration between 5 and 200 nM, e.g., between 10 and 100 nM or between 20 and 50 nM, e.g., about 40 nM.

[0290] The presently disclosed subject matter further provides for a cell or a population of cells produced (e.g., altered) by a method described herein.

[0291] The presently disclosed subject matter further provides for a method of treating a subject suffering from or likely to develop an HIV infection or AIDS, e.g., altering the structure, e.g., sequence, of a target nucleic acid of the subject, comprising contacting the subject (or a cell from the subject) with:

[0292] (a) a first gRNA molecule that targets the CCR5 gene, e.g., a gRNA molecule disclosed herein;

[0293] (b) a second gRNA molecule that targets the CXCR4 gene, e.g., a gRNA molecule disclosed herein;

[0294] (c) a Cas9 molecule or molecules, e.g., a Cas9 molecule disclosed herein; and

[0295] optionally, (d) a third gRNA molecule that targets the CCR5 gene, and optionally, (e) a fourth gRNA molecule that target the CCR5 gene, and still further optionally, (f) a fifth gRNA molecule that target the CCR5 gene, and optionally (g) a sixth gRNA molecule that targets the CXCR4 gene, and optionally, (h) a seventh gRNA molecule that target the CXCR4 gene, and still further optionally, (i) an eighth gRNA molecule that target the CXCR4 gene.

[0296] In certain embodiments, the method comprises contacting with (a), (b) and (c). In certain embodiments, the method comprises contacting the cell with (a), (b), (c), and (d). In certain embodiments, the method comprises contacting the cell with (a), (b), (c), (d), and (g).

[0297] The gRNA molecules that target the CCR5 gene (the gRNA molecules of (a), (d), (e) and (f)) may comprise a targeting domain that comprises a nucleotide sequence selected from SEQ ID NOS: 208 to 3739, or comprise a targeting domain that comprises a nucleotide sequence that differs by no more than 1, 2, 3, 4, or 5 nucleotides from, a nucleotide sequence selected from SEQ ID NOS: 208 to 3739.

[0298] The gRNA molecule that target the CXCR4 gene (the gRNA molecules of (b), (g), (h) and (i)) may comprise a targeting domain that comprises a nucleotide sequence selected from SEQ ID NOS: 3740 to 8407, or comprise a targeting domain that comprises a nucleotide sequence that differs by no more than 1, 2, 3, 4, or 5 nucleotides from, a nucleotide sequence selected from SEQ ID NOS: 3740 to 8407.

[0299] In certain embodiments, the method comprises acquiring knowledge of the presence or absence of a mutation at a CCR5 target position in said subject. In certain embodiments, the method comprises acquiring knowledge of the presence or absence of a mutation at a CCR5 target position in said subject by sequencing the CCR5 gene or a portion of the CCR5 gene. In certain embodiments, the method comprises acquiring knowledge of the presence or absence of a mutation at a CXCR4 target position in said subject. In certain embodiments, the method comprises acquiring knowledge of the presence or absence of a mutation at a CXCR4 target position in said subject by sequencing the CXCR4 gene or a portion of the CXCR4 gene. In certain embodiments, the method comprises introducing a mutation at a CCR5 target position and introducing a mutation at a CXCR4 target position. In certain embodiments, the method comprises introducing a mutation at a CCR5 target position, e.g., by NHEJ, and introducing a mutation at a CXCR4 target position, e.g., by NHEJ.

[0300] When the method comprises introducing a mutation at a CCR5 target position and introducing a mutation at a CXCR4 target position, e.g., by NHEJ in the coding region or a non-coding region of CCR5 gene, e.g., by NHEJ in the coding region or a non-coding region of CXCR4 gene, a Cas9 of (b) and at least two guide RNAs (e.g., a guide RNA of (a) and a guide RNA of (e)) are included in the contacting step.

[0301] In certain embodiments, a cell of the subject is contacted ex vivo with (a), (b), (c) and optionally (d), further optionally (g), further optionally one or more of (e), (f), (h) and (i). In certain embodiments, said cell is returned to the subject's body. In certain embodiments, a cell of the subject is contacted is in vivo with (a), (b), (c) and optionally (d), further optionally (g), further optionally one or more of (e), (f), (h) and (i). In certain embodiments, the method comprises contacting the subject with a nucleic acid composition, e.g., a vector, e.g., an AAV vector, described herein, e.g., a nucleic acid that encodes at least one of (a), (b), (c), and optionally (d), further optionally (g), further optionally one or more of (e), (f), (h) and (i).

[0302] In certain embodiments, the method comprises delivering to said subject said Cas9 molecule or molecules of (c), as a protein or mRNA, and a nucleic acid composition that encodes (a) and (b) and optionally (d), further optionally (g), further optionally one or more of (e), (f), (h) and (i).

[0303] In certain embodiments, the method comprises delivering to the subject the Cas9 molecule or molecules of (c), as a protein or mRNA, said first and second gRNAs of (a) and of (b), as an RNA, and optionally said third gRNA molecule of (d), further optionally further optionally (g), further optionally one or more of (e), (f), (h) and (i) as an RNA.

[0304] In certain embodiments, the method comprises delivering to the subject the first and second gRNAs of (a) and (b), as an RNA, optionally said third gRNA molecule of (d), further optionally (g), further optionally one or more of (e), (f), (h) and (i) as an RNA, and a nucleic acid composition that encodes the Cas9 molecule or molecules of (c).

[0305] The presently disclosed subject matter further provides for a reaction mixture comprising two or more gRNA molecules, a nucleic acid composition, or a composition described herein, and a cell, e.g., a cell from a subject having, or likely to develop and HIV infection or AIDS, a subject having a mutation at a CCR5 target position (e.g., a heterozygous carrier of a CCR5 mutation), or a subject having a mutation at a CXCR4 target position (e.g., a heterozygous carrier of a CXCR4 mutation).

[0306] The presently disclosed subject matter further provides for a kit comprising, (a) a first gRNA molecule that targets the CCR5 gene, as described herein or a nucleic acid that encodes thereof, (b) a second gRNA molecule that targets the CXCR4 gene, as described herein or a nucleic acid that encodes thereof, and one or more of the following:

[0307] (c) a Cas9 molecule or molecules, e.g., a Cas9 molecule described herein, or a nucleic acid or mRNA that encodes the Cas9 molecule; and optionally,

[0308] (d), (e), and/or (f) a third, fourth, and/or fifth gRNA molecule, each of which targets the CCR5 gene, e.g., a third gRNA molecule described herein or a nucleic acid that encodes (c)(i); further optionally,

[0309] (g), (h), and/or (i) a sixth, seventh, and/or eight gRNA molecule, each of which targets the CXCR4 gene.

[0310] The presently disclosed subject matter further provides for two or more (e.g., 3, 4, 5, 6, 7, or 8) of the gRNA molecules described herein, for use in treating, or delaying the onset or progression of, HIV infection or AIDS in a subject, e.g., in accordance with a method of treating, or delaying the onset or progression of, HIV infection or AIDS as described herein. In certain embodiments, the gRNA molecules used in combination with a Cas9 molecule, e.g., a Cas9 molecule described herein.

[0311] The presently disclosed subject matter further provides for use of two or more (e.g., 3, 4, 5, 6, 7, or 8) of the gRNA molecules described herein, in the manufacture of a medicament for treating, or delaying the onset or progression of, HIV infection or AIDS in a subject, e.g., in accordance with a method of treating, or delaying the onset or progression of, HIV infection or AIDS as described herein. In certain embodiments, the medicament comprises a Cas9 molecule, e.g., a Cas9 molecule described herein.

[0312] The gRNA molecules and methods, as disclosed herein, can be used in combination with a governing gRNA molecule. As used herein, a governing gRNA molecule refers to a gRNA molecule comprising a targeting domain which is complementary to a target domain on a nucleic acid that encodes a component of the CRISPR/Cas system introduced into a cell or subject. For example, the methods described herein can further include contacting a cell or subject with a governing gRNA molecule or a nucleic acid encoding a governing molecule. In certain embodiments, the governing gRNA molecule targets a nucleic acid that encodes a Cas9 molecule or a nucleic acid that encodes a target gene gRNA molecule. In certain embodiments, the governing gRNA comprises a targeting domain that is complementary to a target domain in a sequence that encodes a Cas9 component, e.g., a Cas9 molecule or target gene gRNA molecule. In certain embodiments, the target domain is designed with, or has, minimal homology to other nucleic acid sequences in the cell, e.g., to minimize off-target cleavage. For example, the targeting domain on the governing gRNA can be selected to reduce or minimize off-target effects. In certain embodiments, a target domain for a governing gRNA can be disposed in the control or coding region of a Cas9 molecule or disposed between a control region and a transcribed region. In certain embodiments, a target domain for a governing gRNA can be disposed in the control or coding region of a target gene gRNA molecule or disposed between a control region and a transcribed region for a target gene gRNA. In certain embodiments, altering, e.g., inactivating, a nucleic acid that encodes a Cas9 molecule or a nucleic acid that encodes a target gene gRNA molecule can be effected by cleavage of the targeted nucleic acid sequence or by binding of a Cas9 molecule/governing gRNA molecule complex to the targeted nucleic acid sequence.

[0313] The compositions, reaction mixtures and kits, as disclosed herein, can also include a governing gRNA molecule, e.g., a governing gRNA molecule disclosed herein.

[0314] Unless otherwise defined, all technical and scientific terms used herein have the same meaning as commonly understood by one of ordinary skill in the art to which this invention belongs. Although methods and materials similar or equivalent to those described herein can be used in the practice or testing of the present invention, suitable methods and materials are described below. All publications, patent applications, patents, and other references mentioned herein are incorporated by reference in their entirety. In addition, the materials, methods, and examples are illustrative only and not intended to be limiting.

[0315] Headings, including numeric and alphabetical headings and subheadings, are for organization and presentation and are not intended to be limiting.

[0316] Other features and advantages of the invention can be apparent from the detailed description, drawings, and from the claims.

### BRIEF DESCRIPTION OF THE DRAWINGS

[0317] FIGS. 1A-1I are representations of several exemplary gRNAs. FIG. 1A depicts a modular gRNA molecule derived in part (or modeled on a sequence in part) from Streptococcus pyogenes (S. pyogenes) as a duplexed structure (SEQ ID NOs:39 and 40, respectively, in order of appearance); FIG. 1B depicts a unimolecular gRNA molecule derived in part from S. pyogenes as a duplexed structure (SEQ ID NO:41); FIG. 1C depicts a unimolecular gRNA molecule derived in part from S. pyogenes as a duplexed structure (SEQ ID NO:42); FIG. 1D depicts a unimolecular gRNA molecule derived in part from S. pyogenes as a duplexed structure (SEQ ID NO:43); FIG. 1E depicts a unimolecular gRNA molecule derived in part from S. pyogenes as a duplexed structure (SEQ ID NO:44); FIG. 1F depicts a modular gRNA molecule derived in part from Streptococcus thermophilus (S. thermophilus) as a duplexed structure (SEQ ID NOs:45 and 46, respectively, in order of appearance); and FIG. 1G depicts an alignment of modular gRNA molecules of S. pyogenes and S. thermophilus (SEQ ID NOs:39, 45, 47, and 46, respectively, in order of appearance). FIGS. 1H-1I depicts additional exemplary structures of unimolecular gRNA molecules. FIG. 1H shows an exemplary structure of a unimolecular gRNA molecule derived in part from S. pyogenes as a duplexed structure (SEQ ID NO:42). FIG. 1I shows an exemplary structure of a unimolecular gRNA molecule derived in part from S. aureus as a duplexed structure (SEQ ID NO:38).

[0318] FIGS. 2A-2G depict an alignment of Cas9 sequences (Chylinski 2013). The N-terminal RuvC-like domain is boxed and indicated with a “Y.” The other two RuvC-like domains are boxed and indicated with a “B.” The HNH-like domain is boxed and indicated by a “G.” Sm: S. mutans (SEQ ID NO:1); Sp: S. pyogenes (SEQ ID NO:2); St: S. thermophilus (SEQ ID NO:4); and Li: L. innocua (SEQ ID NO:5). “Motif” (SEQ ID NO:14) is a consensus sequence based on the four sequences. Residues conserved in all four sequences are indicated by single letter amino acid abbreviation; “*” indicates any amino acid found in the corresponding position of any of the four sequences; and “-” indicates absent.

[0319] FIGS. 3A-3B show an alignment of the N-terminal RuvC-like domain from the Cas9 molecules disclosed in Chylinski 2013 (SEQ ID NOs:52-95, 120-123). The last line of FIG. 3B identifies 4 highly conserved residues.

[0320] FIGS. 4A-4B show an alignment of the N-terminal RuvC-like domain from the Cas9 molecules disclosed in Chylinski 2013 with sequence outliers removed (SEQ ID NOs:52-123). The last line of FIG. 4B identifies 3 highly conserved residues.

[0321] FIGS. 5A-5C show an alignment of the HNH-like domain from the Cas9 molecules disclosed in Chylinski 2013 (SEQ ID NOs:124-198). The last line of FIG. 5C identifies conserved residues.

[0322] FIGS. 6A-6B show an alignment of the HNH-like domain from the Cas9 molecules disclosed in Chylinski 2013 with sequence outliers removed (SEQ ID NOs:124-141, 148, 149, 151-153, 162, 163, 166-174, 177-187, 194-198). The last line of FIG. 6B identifies 3 highly conserved residues.

[0323] FIG. 7 illustrates gRNA domain nomenclature using an exemplary gRNA sequence (SEQ ID NO:42).

[0324] FIGS. 8A and 8B provide schematic representations of the domain organization of S. pyogenes Cas9. FIG. 8A shows the organization of the Cas9 domains, including amino acid positions, in reference to the two lobes of Cas9 (recognition (REC) and nuclease (NUC) lobes). FIG. 8B shows the percent homology of each domain across 83 Cas9 orthologs.

[0325] FIG. 9 depicts the efficiency of NHEJ mediated by a Cas9 molecule and exemplary gRNA molecules targeting the CCR5 locus.

[0326] FIG. 10 depicts flow cytometry analysis of genome edited HSCs to determine co-expression of stem cell phenotypic markers CD34 and CD90 and for viability (7-AAD-AnnexinV-cells). CD34+ HSCs maintain phenotype and viability after Nucleofection™ with Cas9 and CCR5 gRNA plasmid DNA (96 hours).

[0327] FIGS. 11A-11B depict exemplary results illustrating UM171 pre-treated CD34⁺ HSCs maintain proliferation potential and exhibit increased genome editing at the CXCR4 locus after Nucleofection™ with plasmids expressing S. aureus (Sa) or S. pyogenes (Spy) Cas9 paired with CXCR4-836 and CXCR4-231 gRNAs, respectively. FIG. 11A depicts an exemplary result of the fold expansion of Nucleofected™ CD34⁺ cells 96 hours after delivery of the indicated Cas9 variant paired with CXCR4 gRNA or GFP-expressing plasmid alone (pmax GFP). FIG. 11B depicts an exemplary result of the percentage of indels as detected by T7E1 assays in CD34⁺ HSC after the indicated Nucleofections™. The plus and minus signs under the x-axes indicate treatment +/−40 nM UM171 is indicated.

[0328] FIGS. 12A-12B depict exemplary results illustrating effective multiplex genome editing of CD34⁺ HSCs after Nucleofection™ based co-delivery of plasmids expressing S. pyogenes (Spy) Cas9, one CXCR4 gRNA, and one CCR5 gRNA. FIG. 12A depicts an exemplary result of the fold expansion of Nucleofected™ CD34⁺ cells 96 hours after co-delivery of Cas9 paired with CXCR4 gRNA (CXCR4-231) and CCR5 gRNA (CCR5-U43) plasmids. FIG. 12B depicts an exemplary result of the percentage of indels detected by T7E1 assays in CD34⁺ HSCs at CCR5 and CXCR4 genomic loci.

[0329] FIGS. 13A-13C depicts electroporation of capped and tailed gRNAs increases human CD34⁻ cell survival and viability. CD34⁺ cells were electroporated with the indicated uncapped/untailed gRNAs or capped/tailed gRNAs with paired Cas9 mRNA (either S. pyogenes (Sp)or S. aureus Sa Cas9). Control samples include: cells that were electroporated with GFP mRNA alone or were not electroporated but were cultured for the indicated time frame. FIG. 13A shows the kinetics of CD34⁺ cell expansion after electroporation. FIG. 13B shows the fold change in total live CD34⁺ cells 72 hours after electroporation. FIG. 13C depicts representative flow cytometry data showing maintenance of viable (propidium iodide negative) human CD34⁺ cells after electroporation with capped and tailed AAVS1 gRNA and Cas9 mRNA.

[0330] FIGS. 14A-14G depicts electroporation of Cas9 mRNA and capped and tailed gRNA supports efficient editing in human CD34⁺ cells and their progeny. FIG. 14A shows the percentage of insertions/deletions (indels) detected in CD34⁺ cells and their hematopoietic colony forming cell (CFC) progeny at the targeted AAVS1 locus after delivery of Cas9 mRNA with capped and tailed AAVS1 gRNA compared to uncapped and untailed AAVS1 gRNA. FIG. 14B is an exemplary result demonstrating that hematopoietic colony forming potential (CFCs) is maintained in CD34+ cells after editing with capped/tailed AAVS1 gRNA. Note loss of CFC potential for cells electroporated with uncapped/untailed AAVS1 gRNA. FIG. 14C is an exemplary result demonstrating that delivery of capped and tailed HBB gRNA with S. pyogenes Cas9 mRNA or ribonucleoprotein (RNP) supports efficient targeted locus editing (% indels) in the K562 erythroleukemia cell line, a human erythroleukemia cell line has similar properties to HSCs. FIG. 14D depicts an exemplary result showing that Cas9-mediated/capped and tailed gRNA mediated editing (% indels) at the indicated target genetic loci (AAVS1, HBB, CXCR4) in human cord blood CD34⁺ cells. Right: CFC potential of cord blood CD34⁺ cells after electroporation with Cas9 mRNA and capped and tailed HBB_Sp8 gRNA (unelectroporated control or cells electroporated with 2 or 10 μg HBB gRNAs). Cells were electroporated with Cas9 mRNA and 2 or 10 μg of gRNA. FIG. 14E shows CFC assays for cells electroporated with 2 μg or 10 μg of capped/tailed HBB gRNA. CFCs: colony forming cells, GEMM: mixed hematopoietic colony granulocyte-erythrocyte-macrophage-monocyte, E: erythrocyte colony, GM: granulocyte-macrophage colong, G: granulocyte colony. FIG. 14F depicts a representative gel image showing cleavage at the indicated loci (T7E1 analysis) in cord blood CD34⁺ cells at 72 hours after delivery of capped and tailed AAVS1, HBB, or CXCR4 gRNA and S. pyogenes Cas9 mRNA. The example gel corresponds to the summary data shown in FIG. 14D. FIG. 14G depicts cell viability in CB CD34⁺ cells 48 hours after delivery of Cas9 mRNA and indicated gRNAs as determined by co-staining with 7-AAD and Annexin V and flow cyotometry analysis.

[0331] FIG. 15 depicts gene editing in genomic DNA from K562 cells after electroporation of plasmid DNA encoding S. aureus Cas9 and DNA encoding each gRNA regulated by U6 promoter as determined by T7E1 endonuclease assay.

### DETAILED DESCRIPTION

[0332] For purposes of clarity of disclosure and not by way of limitation, the detailed description is divided into the following subsections:

[0333] 1. Definitions

[0334] 2. Human Immunodeficiency Virus (HIV)

[0335] 3. Methods to Treat or Prevent HIV Infection or AIDS;

[0336] 4. Methods of Targeting CCR5

[0337] 5. Methods of Targeting CXCR4

[0338] 6. Methods of Multiplexed Targeting of Both CCR5 and CXCR4

[0339] 7. Guide RNA (gRNA) Molecules

[0340] 8. Methods for Designing gRNAs

[0341] 9. Cas9 Molecules

[0342] 10. Functional Analysis of Candidate Molecules

[0343] 11. Genome Editing Approaches

[0344] 12. Target Cells

[0345] 13. Delivery, Formulations and Routes of Administration

[0346] 14. Modified Nucleosides, Nucleotides, and Nucleic Acids

### 1. Definitions

[0347] As used herein, the term “about” or “approximately” means within an acceptable error range for the particular value as determined by one of ordinary skill in the art, which can depend in part on how the value is measured or determined, i.e., the limitations of the measurement system. For example, “about” can mean within 3 or more than 3 standard deviations, per the practice in the art. Alternatively, “about” can mean a range of up to 20%, preferably up to 10%, more preferably up to 5%, and more preferably still up to 1% of a given value. Alternatively, particularly with respect to biological systems or processes, the term can mean within an order of magnitude, preferably within 5-fold, and more preferably within 2-fold, of a value.

[0348] As used herein, a “genome editing system” refers to a system that is capable of editing (e.g., modifying or altering) one or more target genes in a cell, for example by means of Cas9-mediated single or double strand breaks. Genome editing systems may comprise, in various embodiments, (a) one or more Cas9/gRNA complexes, and (b) separate Cas9 molecules and gRNAs that are capable of associating in a cell to form one or more Cas9/gRNA complexes. A genome editing system according to the present disclosure may be encoded by one or more nucleotides (e.g. RNA, DNA) comprising coding sequences for Cas9 and/or gRNAs that can associate to form a Cas9/gRNA complex, and the one or more nucleotides encoding the gene editing system may be carried by a vector as described herein.

[0349] In certain embodiments, the genome editing system targets a CCR5 gene. In certain embodiments, the CCR5 gene is a human CCR5 gene. In certain embodiments, the genome editing system targets a CXCR4 gene. In certain embodiments, the CXCR4 gene is a human CXCR4 gene. In certain embodiments, the genome editing system targets a CCR5 gene (e.g., a human CCR5 gene) and a CXCR4 gene (e.g., a human CXCR4 gene).

[0350] In certain embodiments, the genome editing system that targets a CCR5 gene comprises a first gRNA molecule comprising a targeting domain complementary to a target domain (also referred to as “target sequence”) in the CCR5 gene, or a polynucleotide encoding thereof, and at least one Cas9 molecule or polynucleotide(s) encoding thereof. In certain embodiments, the genome editing system that targets a CCR5 gene further comprises a second gRNA molecule comprising a targeting domain complementary to a second target domain in the CCR5 gene, or a polynucleotide encoding thereof. The the genome editing system that targets a CCR5 gene may further comprise a third and a fourth gRNA molecules that target the CCR5 gene.

[0351] In certain embodiments, the genome editing system that targets a CXCR4 gene comprises a first gRNA molecule comprising a targeting domain complementary to a target domain in the CXCR4 gene, or a polynucleotide encoding thereof, and at least one Cas9 molecule or polynucleotide(s) encoding thereof. In certain embodiments, the genome editing system that targets a CXCR4 gene further comprises a second gRNA molecule comprising a targeting domain complementary to a second target domain in the CXCR4gene, or a polynucleotide encoding thereof. The the genome editing system that targets a CXCR4 gene may further comprise a third and a fourth gRNA molecules that target the CXCR4 gene.

[0352] In certain embodiments, the genome editing system that targets a CCR5 gene and a CXCR4 gene comprises a first gRNA molecule comprising a targeting domain complementary to a target domain in the CCR5 gene, or a polynucleotide encoding thereof, a second gRNA molecule comprising a targeting domain complementary to a target domain in the CXCR4 gene, or a polynucleotide encoding thereof, and at least one Cas9 molecule or polynucleotide(s) encoding thereof. In certain embodiments, the genome editing system that targets a CCR5 gene and a CXCR4 gene further comprises a third gRNA molecule comprising a targeting domain complementary to a second target domain in the CCR5 gene, or a polynucleotide encoding thereof. In certain embodiments, the genome editing system that targets a CCR5 gene and a CXCR4 gene further comprises a fourth gRNA molecule comprising a targeting domain complementary to a second target domain in the CXCR4 gene, or a polynucleotide encoding thereof. The the genome editing system that targets a CCR5 gene and a CXCR4 may further comprise a fifth and a sixth gRNA molecules that target the CCR5gene, and further a seventh and an eight gRNA molecules that target the CXCR4gene.

[0353] In certain embodiments, the genome editing system is implemented in a cell or in an in vitro contact. In certain embodiments, the genome editing system is used in a medicament, e.g., a medicament for modifying one or more target genes (e.g., CCR5 and/or CXCR4 genes), or a medicament for treating HIV infection and AIDS. In certain embodiments, the genome editing system is used in therapy.

[0354] “CCR5 target position”, as used herein, refers to any position that results in inactivation of the CCR5 gene. In certain embodiments, a CCR5 target position refers to any of a CCR5 target knockout position or a CCR5 target knockdown position, as described herein.

[0355] “CXCR4 target position”, as used herein, refers to any position that results in inactivation of the CXCR4 gene. In certain embodiments, a CXCR4 target position refers to any of a CXCR4 target knockout position or a CXCR4 target knockdown position, as described herein.

[0356] “Domain”, as used herein, is used to describe segments of a protein or nucleic acid. Unless otherwise indicated, a domain is not required to have any specific functional property.

[0357] Calculations of homology or sequence identity between two sequences (the terms are used interchangeably herein) are performed as follows. The sequences are aligned for optimal comparison purposes (e.g., gaps can be introduced in one or both of a first and a second amino acid or nucleic acid sequence for optimal alignment and non-homologous sequences can be disregarded for comparison purposes). The optimal alignment is determined as the best score using the GAP program in the GCG software package with a Blossum 62 scoring matrix with a gap penalty of 12, a gap extend penalty of 4, and a frame shift gap penalty of 5. The amino acid residues or nucleotides at corresponding amino acid positions or nucleotide positions are then compared. When a position in the first sequence is occupied by the same amino acid residue or nucleotide as the corresponding position in the second sequence, then the molecules are identical at that position. The percent identity between the two sequences is a function of the number of identical positions shared by the sequences.

[0358] “Governing gRNA molecule”, as used herein, refers to a gRNA molecule that comprises a targeting domain that is complementary to a target domain on a nucleic acid that comprises a sequence that encodes a component of the CRISPR/Cas system that is introduced into a cell or subject. A governing gRNA does not target an endogenous cell or subject sequence. In certain embodiments, a governing gRNA molecule comprises a targeting domain that is complementary with a target sequence on: (a) a nucleic acid that encodes a Cas9 molecule; (b) a nucleic acid that encodes a gRNA which comprises a targeting domain that targets the CCR5 gene (a target gene gRNA); or on more than one nucleic acid that encodes a CRISPR/Cas component, e.g., both (a) and (b). In certain embodiments, a nucleic acid molecule that encodes a CRISPR/Cas component, e.g., that encodes a Cas9 molecule or a target gene gRNA, comprises more than one target domain that is complementary with a governing gRNA targeting domain. In certain embodiments, a governing gRNA molecule complexes with a Cas9 molecule and results in Cas9 mediated inactivation of the targeted nucleic acid, e.g., by cleavage or by binding to the nucleic acid, and results in cessation or reduction of the production of a CRISPR/Cas system component. In certain embodiments, the Cas9 molecule forms two complexes: a complex comprising a Cas9 molecule with a target gene gRNA, which complex can alter the CCR5 gene; and a complex comprising a Cas9 molecule with a governing gRNA molecule, which complex can act to prevent further production of a CRISPR/Cas system component, e.g., a Cas9 molecule or a target gene gRNA molecule. In certain embodiments, a governing gRNA molecule/Cas9 molecule complex binds to or promotes cleavage of a control region sequence, e.g., a promoter, operably linked to a sequence that encodes a Cas9 molecule, a sequence that encodes a transcribed region, an exon, or an intron, for the Cas9 molecule. In certain embodiments, a governing gRNA molecule/Cas9 molecule complex binds to or promotes cleavage of a control region sequence, e.g., a promoter, operably linked to a gRNA molecule, or a sequence that encodes the gRNA molecule. In certain embodiments, the governing gRNA, e.g., a Cas9-targeting governing gRNA molecule, or a target gene gRNA-targeting governing gRNA molecule, limits the effect of the Cas9 molecule/target gene gRNA molecule complex-mediated gene targeting. In certain embodiments, a governing gRNA places temporal, level of expression, or other limits, on activity of the Cas9 molecule/target gene gRNA molecule complex. In certain embodiments, a governing gRNA reduces off-target or other unwanted activity. In certain embodiments, a governing gRNA molecule inhibits, e.g., entirely or substantially entirely inhibits, the production of a component of the Cas9 system and thereby limits, or governs, its activity.

[0359] “Modulator”, as used herein, refers to an entity, e.g., a drug, that can alter the activity (e.g., enzymatic activity, transcriptional activity, or translational activity), amount, distribution, or structure of a subject molecule or genetic sequence. In certain embodiments, modulation comprises cleavage, e.g., breaking of a covalent or non-covalent bond, or the forming of a covalent or non-covalent bond, e.g., the attachment of a moiety, to the subject molecule. In certain embodiments, a modulator alters the, three dimensional, secondary, tertiary, or quaternary structure, of a subject molecule. A modulator can increase, decrease, initiate, or eliminate a subject activity.

[0360] “Large molecule”, as used herein, refers to a molecule having a molecular weight of at least 2, 3, 5, 10, 20, 30, 40, 50, 60, 70, 80, 90, or 100 kD. Large molecules include proteins, polypeptides, nucleic acids, biologics, and carbohydrates.

[0361] “Polypeptide”, as used herein, refers to a polymer of amino acids having less than 100 amino acid residues. In certain embodiments, it has less than 50, 20, or 10 amino acid residues.

[0362] A “Cas9 molecule” or “Cas9 polypeptide” as used herein refers to a molecule or polypeptide, respectively, that can interact with a gRNA molecule and, in concert with the gRNA molecule, localize to a site comprising a target domain (also referred to as “target sequence”) and, in certain embodiments, a PAM sequence. Cas9 molecules and Cas9 polypeptides include both naturally occurring Cas9 molecules and Cas9 polypeptides and engineered, altered, or modified Cas9 molecules or Cas9 polypeptides that differ, e.g., by at least one amino acid residue, from a reference sequence, e.g., the most similar naturally occurring Cas9 molecule.

[0363] A “reference molecule” as used herein refers to a molecule to which a modified or candidate molecule is compared. For example, a reference Cas9 molecule refers to a Cas9 molecule to which a modified or candidate Cas9 molecule is compared. Likewise, a reference gRNA refers to a gRNA molecule to which a modified or candidate gRNA molecule is compared. The modified or candidate molecule may be compared to the reference molecule on the basis of sequence (e.g., the modified or candidate molecule may have X % sequence identity or homology with the reference molecule) or activity (e.g., the modified or candidate molecule may have X % of the activity of the reference molecule). For example, where the reference molecule is a Cas9 molecule, a modified or candidate molecule may be characterized as having no more than 10% of the nuclease activity of the reference Cas9 molecule. Examples of reference Cas9 molecules include naturally occurring unmodified Cas9 molecules, e.g., a naturally occurring Cas9 molecule from S. pyogenes, S. aureus, or N. meningitidis. In certain embodiments, the reference Cas9 molecule is the naturally occurring Cas9 molecule having the closest sequence identity or homology with the modified or candidate Cas9 molecule to which it is being compared. In certain embodiments, the reference Cas9 molecule is a parental molecule having a naturally occurring or known sequence on which a mutation has been made to arrive at the modified or candidate Cas9 molecule.

[0364] “Replacement”, or “replaced”, as used herein with reference to a modification of a molecule does not require a process limitation but merely indicates that the replacement entity is present.

[0365] “Small molecule”, as used herein, refers to a compound having a molecular weight less than about 2 kD, e.g., less than about 2 kD, less than about 1.5 kD, less than about 1 kD, or less than about 0.75 kD.

[0366] “Subject”, as used herein, may mean either a human or non-human animal. The term includes, but is not limited to, mammals (e.g., humans, other primates, pigs, rodents (e.g., mice and rats or hamsters), rabbits, guinea pigs, cows, horses, cats, dogs, sheep, and goats). In certain embodiments, the subject is a human. In other embodiments, the subject is poultry.

[0367] “Treat”, “treating” and “treatment”, as used herein, mean the treatment of a disease in a mammal, e.g., in a human, including (a) inhibiting the disease, i.e., arresting or preventing its development or progression; (b) relieving the disease, i.e., causing regression of the disease state; (c) relieving one or more symptoms of the disease; and (d) curing the disease.

[0368] “Prevent,” “preventing,” and “prevention” as used herein means the prevention of a disease in a mammal, e.g., in a human, including (a) avoiding or precluding the disease; (b) affecting the predisposition toward the disease; (c) preventing or delaying the onset of at least one symptom of the disease.

[0369] “X” as used herein in the context of an amino acid sequence, refers to any amino acid (e.g., any of the twenty natural amino acids) unless otherwise specified.

### 2. Human Immunodeficiency Virus

[0370] Human Immunodeficiency Virus (HIV) is a virus that causes severe immunodeficiency. In the United States, more than 1 million people are infected with the virus. Worldwide, approximately 30-40 million people are infected.

[0371] HIV is a single-stranded RNA virus that preferentially infects CD4 cells. The virus binds to receptors on the surface of CD4⁺ cells to enter and infect these cells. This binding and infection step is vital to the pathogenesis of HIV. The virus attaches to the CD4 receptor on the cell surface via its own surface glycoproteins, gp120 and gp41. These proteins are made from the cleavage product of gp160. Gp120 binds to a CD4 receptor and must also bind to another coreceptor in order for the virus to enter the host cell. In macrophage-(M-tropic) viruses, the coreceptor is CCR5 occassionaly referred to as the CCR5 receptor. M-tropic virus is found most commonly in the early stages of HIV infection.

[0372] There are two types of HIV-HIV-1 and HIV-2. HIV-1 is the predominant global form and is a more virulent strain of the virus. HIV-2 has lower rates of infection and, at present, predominantly affects populations in West Africa. HIV is transmitted primarily through sexual exposure, although the sharing of needles in intravenous drug use is another mode of transmission.

[0373] As HIV infection progresses, the virus infects CD4 cells and a subject's CD4 counts fall. With declining CD4 counts, a subject is subject to increasing risk of opportunistic infections (OI). Severely declining CD4 counts are associated with a very high likelihood of OIs, specific cancers (such as Kaposi's sarcoma, Burkitt's lymphoma) and wasting syndrome. Normal CD4 counts are between 600-1200 cells/microliter.

[0374] Untreated HIV infection is a chronic, progressive disease that leads to acquired immunodeficiency syndrome (AIDS) and death in the vast majority of subjects. Diagnosis of AIDS is made based on infection with a variety of opportunistic pathogens, presence of certain cancers and/or CD4 counts below 200 cells/μL.

[0375] HIV was untreatable and invariably led to death until the late 1980's. Since then, antiretroviral therapy (ART) has dramatically slowed the course of HIV infection. Highly active antiretroviral therapy (HAART) is the use of three or more agents in combination to slow HIV. Antiretroviral therapy (ART) is indicated in a subject whose CD4 counts has dropped below 500 cells/μL. Viral load is the most common measurement of the efficacy of HIV treatment and disease progression. Viral load measures the amount of HIV RNA present in the blood.

[0376] Treatment with HAART has significantly altered the life expectancy of those infected with HIV. A subject in the developed world who maintains their HAART regimen can expect to live into their 60's and possibly 70's. However, HAART regimens are associated with significant, long term side effects. First, the dosing regimens are complex and associated with strict food requirements. Compliance rates with dosing can be lower than 50% in some populations in the United States. In addition, there are significant toxicities associated with HAART treatment, including diabetes, nausea, malaise, sleep disturbances. A subject who does not adhere to dosing requirements of HAART therapy may have return of viral load in their blood and are at risk for progression to disease and its associated complications.

### 3. Methods to Treat or Prevent HIV Infection or AIDS

[0377] Methods and compositions described herein provide for a therapy, e.g., a one-time therapy, or a multi-dose therapy, that prevents or treats HIV infection and/or AIDS. In certain embodiments, a disclosed therapy prevents, inhibits, or reduces the entry of HIV into CD4 cells of a subject who is already infected. In certain embodiments, methods and compositions described herein prevent, inhibit, and/or reduce the entry of HIV into CD4 cells, CD8 cells, T cells, B cells, neutrophils, eosinophils, GALT, dendritic cells, microglia cells, myeloid progenitor cells, and/or lymphoid progenitor cells of a subject who is already infected. In certain embodiments, knocking out CCR5 on CD4 cells, T cells, GALT, macrophages, dendritic cells, and microglia cells, renders the HIV virus unable to enter host immune cells. In certain embodiments, knocking out CXCR4 on CD4 cells, CD8 cells, T cells, B cells, neutrophils and eosinophils renders the HIV virus unable to enter host immune cells. In certain embodiments, knocking out both CCR5 and CXCR4 on CD4 cells, CD8 cells, T cells, B cells, neutrophils, eosinophils, GALT, dendritic cells, microglia cells, myeloid progenitor cells, lymphoid progenitor cells, hematopoietic stem cells and/or hematopoietic progenitor cells renders the HIV virus unable to enter host immune cells.

[0378] Viral entry into CD4 cells, CD8 cells, T cells, B cells, neutrophils, eosinophils, GALT, dendritic cells, microglia cells, myeloid progenitor cells, and/or lymphoid progenitor cells requires interaction of the viral glycoproteins gp41 and gp120 with both the CD4 receptor and a coreceptor, e.g., CCR5, e.g., CXCR4. Once a functional coreceptor such as CCR5 and/or CXCR4 has been eliminated from the surface of the CD4 cells, CD8 cells, T cells, B cells, neutrophils, eosinophils, GALT, dendritic cells, microglia cells, myeloid progenitor cells, lymphoid progenitor cells, hematopoietic stem cells, and/or hematopoietic progenitor cells, the virus is prevented from binding and entering the host cells. In certain embodiments, the disease does not progress or has delayed progression compared to a subject who has not received the therapy.

[0379] In certain embodiments, subjects with naturally occurring CCR5 receptor mutations who have delayed HIV progression may confer protection by the mechanism of action described herein. Subjects with a specific deletion in the CCR5 gene (e.g., the delta 32 deletion) have been shown to have much higher likelihood of being long-term non-progressors (meaning they did not require HAART and their HIV infection did not progress). See, e.g., Stewart G J et al., 1997 The Australian Long-Term Non-Progressor Study Group. Aids.11:1833-1838. In addition, a subject who was CCR5+ (had a wild type CCR5 receptor) and infected with HIV underwent a bone marrow transplant for acute myeloid lymphoma. See, e.g., Hutter Get al., 2009N ENGL J MED.360:692-698. The bone marrow transplant (BMT) was from a subject homozygous for a CCR5 delta 32 deletion. Following BMT, the subject did not have progression of HIV and did not require treatment with ART. These subjects offer evidence for the fact that alteration of a CCR5 gene (e.g., introduction of one or more mutations (e.g., one or more protective mutations, such as a delta32 mutation), knockout, or knockdown of the CCR5 gene as described in Section 4 below), prevents, delays or diminishes the ability of HIV to infect the subject. Mutation or deletion of the CCR5 gene, or reduced CCR5 gene expression, can therefore reduce the progression, virulence and pathology of HIV.

[0380] In certain embodiments, alteration of a CXCR4 gene (e.g., knockout, knockdown, or introduction one or more mutations (e.g., one more single or two base substitutions) of the CXCR4 gene, e.g., as decribed in Section 5 below) eliminates or reduces CXCR4 gene expression. Decreased expression of coreceptor CXCR4 on the surface of CD4 cells, CD8 cells, T cells, B cells, neutrophils and eosinophils can prevent, delay or diminish the ability of T-trophic HIV to infect the subject. Mutation or deletion of the CXCR4 gene, or reduced CXCR4 gene expression, can therefore reduce the progression, virulence and pathology of HIV.

[0381] In certain embodiments, alteration of both the CCR5 and CXCR4 gene (e.g., as described in Section 6 below) eliminates or reduces CCR5 and CXCR4 gene expression. Decreased expression of co-receptors CCR5 and CXCR4 on the surface of CD4 cells, CD8 cells, T cells, B cells, neutrophils, eosinophils, GALT, dendritic cells, microglia cells, myeloid progenitor cells, and/or lymphoid progenitor cells can prevent, delay or diminish the ability of both M-trophic and T-trophic HIV to infect the subject. Mutation or deletion of both the CCR5 and the CXCR4 genes, or reduced CCR5 and CXCR4 gene expression, can therefore reduce the progression, virulence and pathology of HIV.

[0382] In certain embodiments, a method described herein is used to treat a subject suffering from HIV.

[0383] In certain embodiments, a method described herein is used to treat a subject suffering from AIDS.

[0384] In certain embodiments, a method described herein is used to prevent, or delay the onset or progression of, HIV infection and AIDS in a subject at high risk for HIV infection.

[0385] In certain embodiments, a method described herein results in a selective advantage to survival of treated CD4 cells. In certain embodiments, a method described herein results in a selective advantage to survival of treated CD8 cells, T cells, B cells, neutrophils, eosinophils, GALT, dendritic cells, microglia cells, myeloid progenitor cells, and/or lymphoid progenitor cells. In certain embodiments, some proportion of CD4 cells, T cells, GALT, macrophages, dendritic cells, microglia cells, myeloid progenitor cells, lymphoid progenitor cells, and/or hematopoietic stem cells can be modified and have a CCR5 protective mutation. In certain embodiments, some proportion of CD4 cells, T cells, GALT, macrophages, dendritic cells, microglia cells, myeloid progenitor cells, lymphoid progenitor cells, and/or hematopoietic stem cells can be modified and have a CCR5 deletion mutation. In certain embodiments, some proportion of CD4 cells, T cells, GALT, macrophages, dendritic cells, microglia cells, myeloid progenitor cells, lymphoid progenitor cells, and/or hematopoietic stem cells can be modified and have a CCR5 mutation that decreases CCR5 gene expression. In certain embodiments, some proportion of CD4 cells, CD8 cells, T cells, B cells, neutrophils, eosinophils, myeloid progenitor cells, lymphoid progenitor cells, and/or hematopoietic stem cells can be modified and have a CXCR4 deletion mutation. In certain embodiments, some proportion of CD4 cells, CD8 cells, T cells, B cells, neutrophils, eosinophils, myeloid progenitor cells, lymphoid progenitor cells, and/or hematopoietic stem cells can be modified and have a CXCR4 mutation that decreases CXCR4 gene expression.

[0386] In certain embodiments, some proportion of CD4 cells, CD8 cells, T cells, B cells, neutrophils, eosinophils, GALT, dendritic cells, microglia cells, myeloid progenitor cells, lymphoid progenitor cells, and/or hematopoietic stem cells can be modified and have both a CCR5 protective mutation and a CXCR4 deletion mutation. In certain embodiments, some proportion of CD4 cells, CD8 cells, T cells, B cells, neutrophils, eosinophils, GALT, dendritic cells, microglia cells, myeloid progenitor cells, lymphoid progenitor cells, and/or hematopoietic stem cells can be modified and have both a CCR5 protective mutation and a mutation that decreases CXCR4 gene expression.

[0387] In certain embodiments, some proportion of CD4 cells, CD8 cells, T cells, B cells, neutrophils, eosinophils, GALT, dendritic cells, microglia cells, myeloid progenitor cells, lymphoid progenitor cells, and/or hematopoietic stem cells can be modified and have both a CCR5 deletion mutation and a CXCR4 deletion mutation. In certain embodiments, some proportion of CD4 cells, CD8 cells, T cells, B cells, neutrophils, eosinophils, GALT, dendritic cells, microglia cells, myeloid progenitor cells, lymphoid progenitor cells, and/or hematopoietic stem cells can be modified and have both a CCR5 deletion mutation and a mutation that decreases CXCR4 gene expression.

[0388] In certain embodiments, some proportion of CD4 cells, CD8 cells, T cells, B cells, neutrophils, eosinophils, GALT, dendritic cells, microglia cells, myeloid progenitor cells, lymphoid progenitor cells, and/or hematopoietic stem cells can be modified and have both a mutation that decreases CCR5 gene expression and a CXCR4 deletion mutation. In certain embodiments, some proportion of CD4 cells, CD8 cells, T cells, B cells, neutrophils, eosinophils, GALT, dendritic cells, microglia cells, myeloid progenitor cells, lymphoid progenitor cells, and/or hematopoietic stem cells can be modified and have both a mutation that decreases CCR5 gene expression and a mutation that decreases CXCR4 gene expression. In certain embodiments, these cells are not subject to infection with HIV. Cells that are not modified may be infected with HIV and are expected to undergo cell death. In certain embodiments, after the treatment described herein, treated cells survive, while untreated cells die. In certain embodiments, this selective advantage drives eventual colonization in all body compartments with 100% CCR5-negative CD4 cells, T cells, GALT, macrophages, dendritic cells, microglia cells, myeloid progenitor cells, lymphoid progenitor cells, and hematopoietic stem cells derived from treated cells, conferring complete protection in treated subjects against infection with M tropic HIV. In certain embodiments, this selective advantage drives eventual colonization in all body compartments with 100% CXCR4-negative CD4 cells, CD8 cells, T cells, B cells, neutrophils, eosinophils, myeloid progenitor cells, lymphoid progenitor cells, and hematopoietic stem cells derived from treated cells, conferring complete protection in treated subjects against infection with T tropic HIV. In certain embodiments, this selective advantage drives eventual colonization in all body compartments with 100% CCR5-negative and 100% CXCR4-negative CD4 cells, CD8 cells, T cells, B cells, neutrophils, eosinophils, GALT, dendritic cells, microglia cells, myeloid progenitor cells, lymphoid progenitor cells, and hematopoietic stem cells derived from treated cells, conferring complete protection in treated subjects against infection with both M tropic and T tropic HIV.

[0389] In certain embodiments, the method comprises initiating treatment of a subject prior to disease onset.

[0390] In certain embodiments, the method comprises initiating treatment of a subject after disease onset.

[0391] In certain embodiments, the method comprises initiating treatment of a subject after disease onset, e.g., 1, 2, 3, 4, 5, 6, 7, 8, 9, 10, 12, 16, 24, 36, 48 or more months after onset of HIV infection or AIDS. In certain embodiments, this may be effective as disease progression is slow in some cases and a subject may present well into the course of illness.

[0392] In certain embodiments, the method comprises initiating treatment of a subject in an advanced stage of disease, e.g., to slow viral replication and viral load.

[0393] Overall, initiation of treatment for a subject at all stages of disease is expected to prevent or reduce disease progression and benefit a subject.

[0394] In certain embodiments, the method comprises initiating treatment of a subject prior to disease onset and prior to infection with HIV.

[0395] In certain embodiments, the method comprises initiating treatment of a subject in an early stage of disease, e.g., when when a subject has tested positive for HIV infection but has no signs or symptoms associated with HIV.

[0396] In certain embodiments, the method comprises initiating treatment of a patient at the appearance of a reduced CD4 count or a positive HIV test.

[0397] In certain embodiments, the method comprises treating a subject considered at risk for developing HIV infection.

[0398] In certain embodiments, the method comprises treating a subject who is the spouse, partner, sexual partner, newborn, infant, or child of a subject with HIV.

[0399] In certain embodiments, the method comprises treating a subject for the prevention or reduction of HIV infection.

[0400] In certain embodiments, the method comprises treating a subject at the appearance of any of the following findings consistent with HIV: low CD4 count; opportunistic infections associated with HIV, including but not limited to: candidiasis, mycobacterium tuberculosis, cryptococcosis, cryptosporidiosis, cytomegalovirus; and/or malignancy associated with HIV, including but not limited to: lymphoma, Burkitt's lymphoma, or Kaposi's sarcoma.

[0401] In certain embodiments, the method comprises treating a subject who is undergoing a heterologous hematopoietic stem cell transplant, including an umbilical cord blood transplant, e.g., in a subject with or without HIV.

[0402] In certain embodiments, a cell is treated ex vivo and returned to a patient.

[0403] In certain embodiments, an autologous CD4 cell can be treated ex vivo and returned to the subject. In certain embodiments, an autologous CD8 cell, T cell, B cell, neutrophil, eosinophil, GALT, dendritic cell, microglia cell, myeloid progenitor cell, and/or lymphoid progenitor cell cell can be treated ex vivo and returned to the subject.

[0404] In certain embodiments, a heterologous CD4 cell can be treated ex vivo and transplanted into the subject. In certain embodiments, a heterologous CD8 cell, T cell, B cell, neutrophil, eosinophil, GALT, dendritic cell, microglia cell, myeloid progenitor cell, and/or lymphoid progenitor cell cell can be treated ex vivo and returned to the subject.

[0405] In certain embodiments, an autologous stem cell, e.g., an autologous hematopoietic stem cell, e.g., an autologous umbilical cord blood transplant cell, can be treated ex vivo and returned to the subject.

[0406] In certain embodiments, a heterologous stem cell, e.g., a heterologous hematopoietic stem cell, e.g., an autologous umbilical cord blood transplant cell, can be treated ex vivo and transplanted into the subject.

[0407] In certain embodiments, the treatment comprises delivery of a gRNA molecule by intravenous injection, intramuscular injection; subcutaneous injection; intra bone marrow injection; intrathecal injection; or intraventricular injection.

[0408] In certain embodiments, the treatment comprises delivery of a gRNA molecule by an AAV.

[0409] In certain embodiments, the treatment comprises delivery of a gRNA molecule by a lentivirus.

[0410] In certain embodiments, the treatment comprises delivery of a gRNA molecule by a nanoparticle.

[0411] In certain embodiments, the treatment comprises delivery of a gRNA molecule by a parvovirus, e.g., a specifically a modified parvovirus designed to target bone marrow cells and/or CD4 cells, CD8 cells, T cells, B cells, neutrophils, eosinophils, GALT, dendritic cells, microglia cells, myeloid progenitor cells, lymphoid progenitor cells, and/or hematopoietic stem cells.

[0412] In certain embodiments, the treatment is initiated after a subject is determined to not have a mutation (e.g., an inactivating mutation, e.g., an inactivating mutation in either or both alleles) in CCR5 by genetic screening, e.g., genotyping, wherein the genetic testing was performed prior to or after disease onset.

[0413] In certain embodiments, treatment to eliminate or decrease CXCR4 gene expression is initiated after a subject is determined to have a mutation (e.g., an inactivating mutation, e.g., an inactivating mutation in either or both alleles) in CCR5 by genetic screening, e.g., genotyping, wherein the genetic testing was performed prior to or after disease onset.

[0414] 3.1. Modified HSC Transplantation for the Treatment of HIV/AIDS

[0415] Transplantation of HSCs into a subject suffering from HIV is curative if the cells are genetically modified to resist HIV infection (e.g., reduced expression of CXCR4 and/or CCR5 HIV co-receptor). For treatment, the patient is transplanted with either autologous or HLA-matched/HLA-identical HSCs that are genome-edited such that all blood progeny from the modified HSCs are resistant to HIV infection. The HSCs are collected from the donor (either autologous or allogeneic HLA-matched/HLA identical), genome-edited ex vivo to confer resistance to HIV infection, and then infused the patient. After the HSCs engraft, the HSCs can reconstitute the blood lineages such that the HSC progeny (e.g., blood lineages, e.g., myeloid cells, lymphoid cells, microglia) can have altered expression of CCR5 and CXCR4, and thus, the HIV virus is unable to enter the genome-edited blood cells (i.e., the progeny of the genome-edited HSCs). Without wishing to be bound by any theory, it is thought that, insofar as the only cells to survive HIV infection are the cells that are genome-edited to be resistant to HIV infection, the genome-edited lymphoid and myeloid cells will have a selective advantage over the unedited cells. The absence of T cells due to HIV infection provides selective pressure on genome editing HScs to produce HIV resistant blood cells beause there are not enough cells present for immune function. This selective advantage suggests that (while not wishing to be bound by theory) even comparatively low levels of gene editing (<10%, e.g. 4% or 5%) in the HSCs before transplant could be sufficient to support repopulation of the blood in vivo after transplant with genome-edited HIV resistant myeloid and lymphoid progeny. Transplantation of CCR5 and/or CXCR4 genome-edited autologous or allogeneic HLA-matched/HLA-identical HSCs provides an HIV resistant immune system after transplantation.

[0416] 3.2. Modified T Cell Add-Back in the Case of Allogeneic HSC Transplantation

[0417] A subject suffering from HIV who is undergoing allogeneic HSC transplantation is at risk for opportunistic infections in the period immediately following transplantation. A subject suffering from HIV commonly suffers from low T cell counts due to virus induced destruction of T cells; the subject can be T cell depleted prior to HSC transplantation. In addition, the subject receives a myeloablative conditioning regimen to prepare for the HSC transplantation, which further depletes T cells that help prevent infection. Immune reconstitution can take several months in the subject. During this time, HSCs from the donor differentiate into T cells, travel to the thymus and are exposed to antigens and begin to reconstitute adaptive immunity.

[0418] In a subject suffering from HIV who is undergoing allogeneic HSC transplantation, the use of modified T cell add-back in the period immediately following the transplant can provide an adaptive immunity lymphoid bridge. HSCs derived from the bone marrow or peripheral blood of the donor are modified according to the methods, e.g., undergo CRISPR/Cas9-mediated modifications at the CXCR4 and/or CCR5 locus, and are differentiated into lymphoid progenitor cells ex vivo. Modification, e.g., CRISPR/Cas9 mediated modifications at the CXCR4 and/or CCR5 locus, renders the cells HIV-resistant. The differentiated, HIV-resistant lymphoid progenitor cells or lymphoid cells are dosed in a subject immediately following myeloablative conditioning and prior to allogeneic HSC transplant, or co-infused with HSC transplant, or dosed following HSC transplant. In certain embodiments, administration of HIV resistant, differentiated lymphoid cells in a subject undergoing HSC transplantation provides a short term lymphoid bridge of HIV resistant cells. These cells provide short term immunity against opportunistic infection. The modified T cells used in lymphoid or T cell add-back may have a limited life span (approximately 2 weeks to 60 days to one year) (Westera et al., Blood 2013; 122(13):2205-2212). In the immediate post-transplantation period, these cells can provide protective immunity in a subject. The dose of such cells can be modified to balance immune protection (conferred by dosing with HIV resistant, differentiated lymphoid cells), Graft vs. Leukemia effect (GVL) in the case where the HIV patient also has concominant blood cancer (e.g., lymphoma), and graft versus host disease (a higher risk of GVHD is associated with higher T cell doses) (Montero et al., Biol Blood Marrow Transplant. 2006 Dec.; 12(12):1318-25). The methods described herein can be dosed one, two, three or multiple times, to maintain T cell counts and immunity until the donor HSC cells have reconstituted the lymphoid lineage.

[0419] In a subject suffering from HIV who is undergoing allogeneic HSC transplantation, the use of myeloid and T cell add-back in the period immediately following the transplant can provide a myeloid and adaptive immunity lymphoid bridge. Donor HSCs are modified according to the methods described herein and differentiated into myeloid and lymphoid progenitor cells ex vivo. The differentiated, HIV-resistant myeloid and lymphoid progenitor cells are dosed in a subject immediately following myeloablative conditioning and prior to allogeneic HSC transplant, or co-infused with HSC transplant, or dosed following HSC transplant. The differentiated, HIV-resistant myeloid and lymphoid progenitor cells are dosed together, or are dosed separately, e.g., modified, HIV resistant myeloid progenitor cells are dosed in one dosing regimen and modified, HIV resistant lymphoid progenitor cells are dosed in an alternative dosing regimen. Administration of HIV resistant, differentiated myeloid and lymphoid cells in a subject undergoing HSC transplantation provides a short term myeloid and lymphoid bridge of HIV resistant cells. These cells provide short term protection against anemia and short term immunity against opportunistic infection. These cells can have a limited life span. In the immediate post-transplantation period, these cells can improve anemia and provide protective immunity in a subject. The dose of such cells can be modified to balance immune protection (conferred by dosing with HIV resistant, differentiated myeloid and lymphoid cells) and graft versus host disease (a higher risk of GVHD is associated with higher T cell doses) (Montero et al., Biol Blood Marrow Transplant. 2006 Dec.; 12(12):1318-25). The methods described herein can be dosed one, two, three or multiple times, to maintain myeloid and lymphoid cell counts and until the donor HSC cells have reconstituted the myeloid and lymphoid lineage.

[0420] In certain embodiments, the method is used to treat a subject with late-stage HIV who is at risk for opportunistic infection due to very low and/or declining T cell counts. In certain embodiments, the method of T cell add-back is used to treat a subject with late-stage HIV who is undergoing allogeneic HSCT for the treatment of HIV. In certain embodiments, the method of T cell add-back is used to treat a subject with any stage of HIV who is undergoing allogeneic HSCT for the treatment of HIV.

[0421] 3.3. Modified T Cell Add-Back in the Case of Autologous HSC Transplantation

[0422] A subject suffering from HIV who is undergoing autologous HSC transplantation is at risk for opportunistic infections in the period immediately following transplantation. A subject suffering from HIV commonly suffers from low T cell counts due to virus induced destruction of T cells. The HIV-positive subject who is a candidate for HSC transplantation receives a myeloablative conditioning regimen to prepare for the HSC transplantation. Myeloablation further depletes HIV-infected and HIV-uninfected T cells that help prevent infection. Immune reconstitution can take 2-3 months in the subject. During this time, HSCs from the transplant differentiate into T-cells, travel to the thymus and are exposed to antigens and begin to reconstitute adaptive immunity.

[0423] In a subject suffering from HIV who is undergoing autologous HSC transplantation, the use of modified T cell add-back in the period immediately following the transplant can provide an adaptive immunity lymphoid bridge. HSCs or PBSCs derived from the bone marrow or peripheral blood of the subject are modified according to the methods, e.g., undergo CRISPR/Cas9-mediated modifications at the CXCR4 and/or CCR5 locus, and are differentiated into lymphoid progenitor cells ex vivo. Modification, e.g., CRISPR/Cas9 mediated modifications at the CXCR4 and/or CCR5 locus, renders the cells HIV-resistant.

[0424] An advantage of modifying HSCs or lymphoid progenitor cells (as opposed to modifying T cells) is that these cells are not infected with HIV (HSCs and progenitors do not express both HIV co-receptors that are required for viral entry). T cells that have been modified by the methods, e.g., autologous T cells that have been differentiated from HIV-negative HSC or progenitors and have been edited by the methods described herein, can be HIV resistant when re-infused back to the subject.

[0425] Autologous, differentiated, HIV-resistant lymphoid progenitor cells or T cells can be dosed in a subject immediately following myeloablative conditioning and prior to autologous HSC transplant, or co-infused with HSC transplant, or dosed following HSC transplant. In certain embodiments, administration of HIV resistant, differentiated lymphoid cells or T cells in a subject undergoing autologous HSC transplantation provides a short term lymphoid bridge of HIV resistant cells. These cells provide short term immunity against opportunistic infection. The modified T cells used in lymphoid or T cell add-back can have a limited life span (approximately 2 weeks to 60 days to 1 year) (Westera et al., Blood 2013; 122(13):2205-2212). In the immediate post-transplantation period, these cells can provide protective immunity in a subject. The dose of such cells can be modified to balance immune protection (conferred by dosing with HIV resistant, differentiated myeloid and lymphoid cells) and graft versus host disease (a higher risk of GVHD is associated with higher T cell doses) (Montero et al., Biol Blood Marrow Transplant. 2006 Dec.; 12(12):1318-25). The methods described herein can be dosed one, two, three or multiple times, to maintain T cell counts and immunity until the autologous HSC cells have reconstituted the lymphoid lineage.

[0426] In a subject suffering from HIV who is undergoing autologous HSC transplantation, the use of myeloid and T cell add-back in the period immediately following the transplant can provide a myeloid and adaptive immunity lymphoid bridge. HSCs derived from the bone marrow or mobilized peripheral blood of the subject are modified according to the methods described herein and differentiated into myeloid and lymphoid progenitor cells ex vivo. An advantage of modifying HSCs mobilized peripheral blood (as opposed to modifying T-cells) is that these cells are not infected with HIV (stem cells are HIV resistant as they do not express both HIV co-receptors) and when added back to the subject can be HIV naïve (as well as HIV resistant). The differentiated, HIV-resistant myeloid and lymphoid progenitor cells are dosed in a subject immediately following myeloablative conditioning and prior to autologous HSC transplant, or co-infused with HSC transplant, or dosed following HSC transplant. The differentiated, HIV-resistant myeloid and lymphoid progenitor cells are dosed together, or are dosed separately, e.g., modified, HIV resistant myeloid progenitor cells are dosed in one dosing regimen and modified, HIV resistant lymphoid progenitor cells are dosed in an alternative dosing regimen. In certain embodiments, administration of HIV resistant, differentiated myeloid and lymphoid cells in a subject undergoing HSC transplantation provides a short term myeloid and lymphoid bridge of HIV resistant cells. These cells provide short term protection against anemia and short term immunity against opportunistic infection. These cells can have a limited life span. In the immediate post-transplantation period, these cells can improve anemia and provide protective immunity in a subject. The dose of such cells can be modified to balance reduced anemia and immune protection (conferred by dosing with HIV resistant, differentiated myeloid and lymphoid cells) and graft versus host disease (a higher risk of GVHD is associated with higher T-cell doses) (Montero et al., Biol Blood Marrow Transplant. 2006 Dec.; 12(12):1318-25). The methods described herein can be dosed one, two, three or multiple times, to maintain myeloid and lymphoid cell counts and until the autologous HSC cells have reconstituted the myeloid and lymphoid lineage.

[0427] In certain embodiments, the method is used to treat a subject with late-stage HIV who is at risk for opportunistic infection due to very low and/or declining T-cell counts. In certain embodiments, the method of T-cell add-back is used to treat a subject with late-stage HIV who is undergoing autologous HSCT for the treatment of HIV. In certain embodiments, the method of T-cell add-back is used to treat a subject with any stage of HIV who is undergoing autologous HSCT for the treatment of HIV.

[0428] 3.4 Stand-Alone T Cell Therapy for HIV—Ex Vivo Modification of Lymphoid Cells and/or T-Cells in Acute or Sub-Acute Setting in a Subject with Opportunistic Infection, Severe HIV and/or Refractory HIV for Short-Term Restoration of T-Cell Mediated Immunity

[0429] Autologous or allogeneic HLA-matched or HLA-identical lymphoid cells and/or T-cells can be modified by the methods, e.g., CRISPR/Cas9-mediated modifications at the CXCR4 gene and/or CCR5 gene, and dosed to subjects with HIV, providing short-term adaptive immunity in subjects with HIV.

[0430] (a) HSCs derived from the bone marrow or mobilized peripheral blood of the subject are modified according to the methods, e.g., CRISPR/Cas9-mediated modifications at the CXCR4 gene and/or CCR5 gene, and differentiated into lymphoid progenitor cells and/or T-cells ex vivo. An advantage of modifying HSCs (as opposed to modifying lymphoid cells or T-cells) is that HSCs are not infected with HIV. Stem cells are HIV resistant as they do not express both HIV co-receptors. When added back to the subject, after differentiation into T-cells, the T-cells can be HIV naive as well as HIV resistant. These modified cells are also self-derived (autologous) so have no risk of generating a graft vs. host immune reaction in the subject.

[0431] (b) HSCs derived from the bone marrow or mobilized peripheral blood of an HLA matched or HLA identical donor are modified ex vivo according to the methods, e.g., CRISPR/Cas9-mediated modifications at the CXCR4 gene and/or CCR5 gene, and differentiated into lymphoid progenitor cells and/or T cells. When added back to the subject, the allogeneic, modified lymphoid cells and/or T cells can be HIV naive as well as HIV resistant.

[0432] (c) T-cells derived from the peripheral blood of a donor are modified ex vivo according to the methods, e.g., CRISPR/Cas9-mediated modifications at the CXCR4 gene and/or CCR5 gene s. When added back to the subject, the modified, allogeneic lymphoid cells and/or T cells can be HIV naive as well as HIV resistant. (See Example 9 for data demonstrating T cell modification.)

[0433] Modified, HIV-resistant T cells (autologous or allogeneic) are dosed in a subject suffering from HIV, including, but not limited to: a subject having an opportunistic infection, a subject hospitalized for a suspected or known opportunistic infection, a subject having rapidly declining T cell counts, a subject having very low T cell counts and being at risk for opportunistic infection, and a subject preparing for surgery or HSC transplantation and requiring additional T cell immunity. The modified lymphoid progenitor cells or T-cells can be used in the setting of severe, HIV, refractory HIV, end-stage HIV (e.g., AIDS), treatment-resistant HIV. The treatment is given in an acute or sub-acute setting in a subject with severe and/or refractory HIV for short-term or intermediate-term restoration of T cell counts, lymphoid activity and/or recovery from opportunistic infection. The goal of treatment is to provide short or intermediate term lymphoid immunity in the case of low T counts or severe opportunistic infection.

### 4. Methods of Altering CCR5

[0434] As disclosed herein, the CCR5 gene can be altered by gene editing, e.g., using CRISPR-Cas9 mediated methods as described herein.

[0435] Methods, genome editing systems, and compositions discussed herein, provide for altering a CCR5 target position in the CCR5 gene. A CCR5 target position can be altered by gene editing, e.g., using CRISPR-Cas9-mediated methods, genome editing systems, and compositions described herein.

[0436] Altering a CCR5 gene can be achieved by one or more of the following approaches:

[0437] (4.1) knocking out the CCR5 gene:
[0438] (4.1a) insertion or deletion (e.g., NHEJ-mediated insertion or deletion) of one or more nucleotides in close proximity to or within the early coding region of the CCR5 gene,
[0439] (4.1b) deletion (e.g., NHEJ-mediated deletion) of a genomic sequence including at least a portion of the CCR5 gene,
[0440] (4.1c) knockout of CCR5 with concomitant knock-in of anti-HIV gene or genes under expression of endogenous promoter or Pol III promoter; and
[0441] (4.1d) knockout of CCR5 with concomitant knock-in of drug resistance selectable marker for enabling selection of modified HSCs;

[0442] (4.2) knocking down the CCR5 gene mediated by enzymatically inactive Cas9 (eiCas9) molecule or an eiCas9-fusion protein; or

[0443] (4.3) Introducing one ore more mutations in the CCR5 gene
[0444] (4.3a) NHEJ-mediated creation of naturally occurring delta 32 mutation in CCR5 gene; and(4.3b) HDR-mediated introduction of delta 32 mutation to CCR5

[0445] Exemplary mechanisms that can be associated with the alteration of a CCR5 gene include, but are not limited to, non-homologous end joining (“NHEJ”; e.g., classical or alternative), microhomology-mediated end joining (“MMEJ”), homology-directed repair (“HDR”; e.g., endogenous donor template mediated), synthesis dependent strand annealing (“SDSA”), single strand annealing or single strand invasion.

[0446] In certain embodiments, the methods, genome editing systems, and compositions described herein introduce one or more breaks near the early coding region in at least one allele of the CCR5 gene. In certain embodiments, methods, genome editing systems, and compositions described herein introduce two or more breaks to flank at least a portion of the CCR5 gene . The two or more breaks remove (e.g., delete) a genomic sequence including at least a portion of the CCR5 gene. In certain embodiments methods described herein comprises creation of naturally occurring delta 32 mutation in the CCR5 gene. In certain embodiments, methods described herein comprise knocking down the CCR5 gene mediated by enzymatically inactive Cas9 (eiCas9) molecule or an eiCas9-fusion protein by targeting the promoter region of CCR5 target knockdown position. In certain embodiments, methods described herein comprises concomitantly knock down the CCR5 gene and knock-in of anti-HIV gene or genes under expression of endogenous promoter or Pol III promoter. In certain embodiments, methods described herein comprises concomitantly knockout of CCR5 gene and knock-in of drug resistance selectable marker for enabling selection of modified HSCs. In certain embodiments, methods described herein comprises HDR-mediated introduction of delta 32 mutation to CCR5. Methods, e.g., approaches 4.1a, 4.1b, 4.2, 4.3a, 4.3b, and 4.4described herein result in targeting (e.g., alteration) of the CCR5 gene.

### (4.1a) Knocking Out CCR5 by Introducing an Indel in the CCR5 Gene

[0447] In certain embodiments, the method comprises introducing an insertion or deletion of one more nucleotides in close proximity to the CCR5 target knockout position (e.g., the early coding region) of the CCR5 gene. As described herein, in certain embodiments, the method comprises the introduction of one or more breaks (e.g., single strand breaks or double strand breaks) sufficiently close to (e.g., either 5′ or 3′ to) the early coding region of the CCR5 target knockout position, such that the break-induced indel could be reasonably expected to span the CCR5 target knockout position (e.g., the early coding region). In certain embodiments, NHEJ-mediated repair of the break(s) allows for the NHEJ-mediated introduction of an indel in close proximity to within the early coding region of the CCR5 target knockout position.

[0448] In certain embodiments, the method comprises introducing a deletion of a genomic sequence comprising at least a portion of the CCR5 gene. As described herein, in certain embodiments, the method comprises the introduction of two double stand breaks—one 5′ and the other 3′ to (i.e., flanking) the CCR5 target position. In certain embodiments, two gRNAs, e.g., unimolecular (or chimeric) or modular gRNA molecules, are configured to position the two double strand breaks on opposite sides of the CCR5 target knockout position in the CCR5 gene.

[0449] In certain embodiments, a single strand break is introduced (e.g., positioned by one gRNA molecule) at or in close proximity to a CCR5 target position in the CCR5 gene. In certain embodiments, a single gRNA molecule (e.g., with a Cas9 nickase) is used to create a single strand break at or in close proximity to the CCR5 target position, e.g., the gRNA is configured such that the single strand break is positioned either upstream (e.g., within 500 bp upstream, e.g., within 200 bp upstream) or downstream (e.g., within 500 bp downstream, e.g., within 200 bp downstream) of the CCR5 target position. In certain embodiments, the break is positioned to avoid unwanted target chromosome elements, such as repeat elements, e.g., an Alu repeat.

[0450] In certain embodiments, a double strand break is introduced (e.g., positioned by one gRNA molecule) at or in close proximity to a CCR5 target position in the CCR5 gene. In certain embodiments, a single gRNA molecule (e.g., with a Cas9 nuclease other than a Cas9 nickase) is used to create a double strand break at or in close proximity to the CCR5 target position, e.g., the gRNA molecule is configured such that the double strand break is positioned either upstream (e.g., within 500 bp upstream, e.g., within 200 bp upstream) or downstream of (e.g., within 500 bp downstream, e.g., within 200 bp downstream) of a CCR5 target position. In certain embodiments, the break is positioned to avoid unwanted target chromosome elements, such as repeat elements, e.g., an Alu repeat.

[0451] In certain embodiments, two single strand breaks are introduced (e.g., positioned by two gRNA molecules) at or in close proximity to a CCR5 target position in the CCR5 gene. In certain embodiments, two gRNA molecules (e.g., with one or two Cas9 nickcases) are used to create two single strand breaks at or in close proximity to the CCR5 target position, e.g., the gRNAs molecules are configured such that both of the single strand breaks are positioned e.g., within 500 bp upstream, e.g., within 200 bp upstream) or downstream (e.g., within 500 bp downstream, e.g., within 200 bp downstream) of the CCR5 target position. In certain embodiments, two gRNA molecules (e.g., with two Cas9 nickcases) are used to create two single strand breaks at or in close proximity to the CCR5 target position, e.g., the gRNAs molecules are configured such that one single strand break is positioned upstream (e.g., within 200 bp upstream) and a second single strand break is positioned downstream (e.g., within 200 bp downstream) of the CCR5 target position. In certain embodiments, the breaks are positioned to avoid unwanted target chromosome elements, such as repeat elements, e.g., an Alu repeat.

[0452] In certain embodiments, two double strand breaks are introduced (e.g., positioned by two gRNA molecules) at or in close proximity to a CCR5 target position in the CCR5 gene. In certain embodiments, two gRNA molecules (e.g., with one or two Cas9 nucleases that are not Cas9 nickases) are used to create two double strand breaks to flank a CCR5 target position, e.g., the gRNA molecules are configured such that one double strand break is positioned upstream (e.g., within 500 bp upstream, e.g., within 200 bp upstream) and a second double strand break is positioned downstream (e.g., within 500 bp downstream, e.g., within 200 bp downstream) of the CCR5 target position. In certain embodiments, the breaks are positioned to avoid unwanted target chromosome elements, such as repeat elements, e.g., an Alu repeat.

[0453] In certain embodiments, one double strand break and two single strand breaks are introduced (e.g., positioned by three gRNA molecules) at or in close proximity to a CCR5 target position in the CCR5 gene. In certain embodiments, three gRNA molecules (e.g., with a Cas9 nuclease other than a Cas9 nickase and one or two Cas9 nickases) to create one double strand break and two single strand breaks to flank a CCR5 target position, e.g., the gRNA molecules are configured such that the double strand break is positioned upstream or downstream of (e.g., within 500 bp, e.g., within 200 bp upstreamor downstream) of the CCR5 target position, and the two single strand breaks are positioned at the opposite site, e.g., downstream or upstrea m (e.g., within 500 bp, e.g., within 200 bp downstream or upstream), of the CCR5 target position. In certain embodiments, the breaks are positioned to avoid unwanted target chromosome elements, such as repeat elements, e.g., an Alu repeat.

[0454] In certain embodiments, four single strand breaks are introduced (e.g., positioned by four gRNA molecules) at or in close proximity to a CCR5 target position in the CCR5 gene. In certain embodiments, four gRNA molecule (e.g., with one or more Cas9 nickases are used to create four single strand breaks to flank a CCR5 target position in the CCR5 gene, e.g., the gRNA molecules are configured such that a first and second single strand breaks are positioned upstream (e.g., within 500 bp upstream, e.g., within 200 bp upstream) of the CCR5 target position, and a third and a fourth single stranded breaks are positioned downstream (e.g., within 500 bp downstream, e.g., within 200 bp downstream) of the CCR5 target position. In certain embodiments, the breaks are positioned to avoid unwanted target chromosome elements, such as repeat elements, e.g., an Alu repeat.

[0455] In certain embodiments, two or more (e.g., three or four) gRNA molecules are used with one Cas9 molecule. In certain embodiments, when two ore more (e.g., three or four) gRNAs are used with two or more Cas9 molecules, at least one Cas9 molecule is from a different species than the other Cas9 molecule(s). For example, when two gRNA molecules are used with two Cas9 molecules, one Cas9 molecule can be from one species and the other Cas9 molecule can be from a different species. Both Cas9 species are used to generate a single or double-strand break, as desired.

### (4.1b) Knocking Out CCR5 by Deleting a Genomic Sequence Including at Least a Portion of the CCR5 Gene

[0456] In certain embodiments, the method comprises deleting (e.g., NHEJ-mediated deletion) a genomic sequence including at least a portion of the CCR5 gene. As described herein, in certain embodiments, the method comprises the introduction two sets of breaks (e.g., a pair of double strand breaks, one double strand break or a pair of single strand breaks, or two pairs of single strand breaks) to flank a region of the CCR5 gene (e.g., a coding region, e.g., an early coding region, or a non-coding region, e.g., a non-coding sequence of the CCR5 gene, e.g., a promoter, an enhancer, an intron, a 3′UTR, and/or a polyadenylation signal). In certain embodiments, NHEJ-mediated repair of the break(s) allows for alteration of the CCR5 gene as described herein, which reduces or eliminates expression of the gene, e.g., to knock out one or both alleles of the CCR5 gene.

[0457] In certain embodiments, two double strand breaks are introduced (e.g., positioned by two gRNA molecules) at or in close proximity to a CCR5 target position in the CCR5 gene. In certain embodiments, two gRNA molecules (e.g., with one or two Cas9 nucleases that are not Cas9 nickases) are used to create two double strand breaks to flank a CCR5 target position, e.g., the gRNA molecules are configured such that one double strand break is positioned upstream (e.g., within 500 bp upstream, e.g., within 200 bp upstream) and a second double strand break is positioned downstream (e.g., within 500 bp downstream, e.g., within 200 bp downstream) of the CCR5 target position. In certain embodiments, the breaks are positioned to avoid unwanted target chromosome elements, such as repeat elements, e.g., an Alu repeat.

[0458] In certain embodiments, one double strand break and two single strand breaks are introduced (e.g., positioned by three gRNA molecules) at or in close proximity to a CCR5 target position in the CCR5 gene. In certain embodiments, three gRNA molecules (e.g., with a Cas9 nuclease other than a Cas9 nickase and one or two Cas9 nickases) to create one double strand break and two single strand breaks to flank a CCR5 target position, e.g., the gRNA molecules are configured such that the double strand break is positioned upstream or downstream of (e.g., within 500 bp, e.g., within 200 bp upstreamor downstream) of the CCR5 target position, and the two single strand breaks are positioned at the opposite site, e.g., downstream or upstrea m (e.g., within 500 bp, e.g., within 200 bp downstream or upstream), of the CCR5 target position. In certain embodiments, the breaks are positioned to avoid unwanted target chromosome elements, such as repeat elements, e.g., an Alu repeat.

[0459] In certain embodiments, four single strand breaks are introduced (e.g., positioned by four gRNA molecules) at or in close proximity to a CCR5 target position in the CCR5 gene. In certain embodiments, four gRNA molecule (e.g., with one or more Cas9 nickases are used to create four single strand breaks to flank a CCR5 target position in the CCR5 gene, e.g., the gRNA molecules are configured such that a first and second single strand breaks are positioned upstream (e.g., within 500 bp upstream, e.g., within 200 bp upstream) of the CCR5 target position, and a third and a fourth single stranded breaks are positioned downstream (e.g., within 500 bp downstream, e.g., within 200 bp downstream) of the CCR5 target position. In certain embodiments, the breaks are positioned to avoid unwanted target chromosome elements, such as repeat elements, e.g., an Alu repeat.

[0460] In certain embodiments, two or more (e.g., three or four) gRNA molecules are used with one Cas9 molecule. In certain embodiments, when two ore more (e.g., three or four) gRNAs are used with two or more Cas9 molecules, at least one Cas9 molecule is from a different species than the other Cas9 molecule(s). For example, when two gRNA molecules are used with two Cas9 molecules, one Cas9 molecule can be from one species and the other Cas9 molecule can be from a different species. Both Cas9 species are used to generate a single or double-strand break, as desired.

(4.1c) CCR5 Knock Out with Concomitant Knock-In of Anti-HIV Gene or Genes Under Expression of Endogenous Promoter or Pol III Promoter

[0461] The method modifies autologous or allogeneic HSCs ex vivo to increase resistance to HIV. In certain embodiments, the CCR5 gene is knocked out in HSCs or lymphoid progenitors or T lymphocytes ex vivo using the methods described herein, e.g., NHEJ-mediated knock-out, and an anti-HIV gene encoded in a transgene expression cassette is inserted using the methods described herein, e.g., homology directed repair. In certain embodiments, in HSCs or lymphoid progenitors or T lymphocytes ex vivo, the CCR5 gene is knocked down using the methods described herein, e.g., dCas9-mediated knock-down, and CCR5 is knocked out using the methods described herein, e.g., NHEJ-mediated knock-out, and an anti-HIV gene, e.g., an anti-HIV peptide encoded in a transgene expression cassette driven by a Pol III promoter, is inserted using the methods described herein, e.g., homology directed repair.

[0462] The cassette expressing an anti-HIV gene is inserted in the CCR5 gene locus, which is considered to be a putative safe harbor locus (Papapetrou et al., Molecular Therapy (12 Feb. 2016)1 doi:10.1038/mt.2016.38). The cassette expressing an anti-HIV gene is inserted in a safe harbor locus. In certain embodiments, a cassette expressing multiple anti-HIV genes are inserted, each with separate promoters, into the CCR5 safe harbor region. In certain embodiments, a cassette expressing multiple anti-HIV genes are inserted, each with separate promoters, into a safe harbor locus. In certain embodiments, the CCR5 coding sequence is disrupted and, simultaneously, another safe harbor site AAVS1 is used for HDR for targeted insertion of an anti-HIV encoding transgene expression cassette.

[0463] In certain embodiments, the anti-HIV gene is under the expression of endogenous CCR5 promoter. In certain embodiments, the anti-HIV gene is under the expression of a Pol III promoter that is delivered as an element of the transgene expression cassette.

[0464] In certain embodiments, the anti-HIV gene is the coding sequence of any of the molecules listed in Table 17.

[0465] In certain embodiments, the anti-HIV gene encodes a siRNA molecule, e.g., shRNA, e-shRNA, hRNA, AgoshRNA.

[0466] In certain embodiments, the anti-HIV gene encodes a ribozyme which targets HIV, e.g., a ribozyme targeting tat/vpr, a ribozyme targeting rev/tat, or a ribozyme targeting U5 leader sequence.

[0467] In certain embodiments, the anti-HIV gene encodes fusion inhibitor, e.g., N36, T21, CP621-652, CP628-654, C34, DP107, IZN36, N36ccg, SFT, SC22EK, MTSC22, MTSC21, MTSC19, HP23, HP22, HP23E, T-1249, IQN17, IQN23, IQN36, IIN17, IQ22N17, II22N17, II15N17, IZN17, IZN23, IZN36, C46, C46-EHO, C37H6, or CP32M.

[0468] In certain embodiments, the anti-HIV gene encodes an HIV-1 trans activation response element (TAR), e.g., TAR decoy or TAR aptamer.

[0469] In certain embodiments, the modified HSCs do not express CCR5 and do express an anti-HIV gene, e.g., CCR5−/−/shRNA knock-in+/+, e.g., CCR5−/−/ribozyme knock-in+/+, e.g., CCR5−/−/fusion inhibitor knock-in+/+, e.g., CCR5−/−/C46 fusion inhibitor knock-in+/+, e.g., CCR5−/−/TAR knock-in+/+. In certain embodiments, the method confers resistance to HIV entry into T-cells, e.g., by CCR5 gene knock-down and/or knock-out, and drives expression of an anti-HIV element. The method confers resistance to HIV infection multiple mechanisms, e.g., by CCR5 knock out and siRNA targeting tat/rev, by CCR5 knock out and expression of a ribozyme targeting tat/vpr, by CCR5 knock out and expression of a ribozyme targeting rev/tat, by CCR5 knock out and expression of a ribozyme targeting U5 leader sequence, by CCR5 knock out and expression of a fusion inhibitor, e.g., C46 fusion inhibitor, T20 fusion inhibitor, by CCR5 knock out and expression of an anti-HIV element listed in Table 17. The aim is to target multiple viral pathways to increase resistance of cells to HIV. In subjects suffering from HIV, single use of fusion inhibitors, such as T20 (enfuvirtide), has led to HIV resistance (Greenberg et al., J Antimicrob Chemother 54:333-340). Targeting multiple pathways concomitantly is a well accepted approach to reducing the likelihood of developing therapy-resistant HIV.

TABLE 17
Anti-HIV Transgenes

| | | Citation | | |
|---|---|---|---|---|
| | | demonstrating | HIV Binding | |
| Agent | Class | anti-HIV activity | region | Sequence |
| T1144 | Fusion | Dwyer, Proc Natl | | |
| | inhibitor | Acad Sci USA. | | |
| | | 2007 Jul 31; | | |
| | | 104(31): 12772-7. | | |
| T1249, | Fusion | | | |
| T1144, | inhibitors | | | |
| T267227, | | | | |
| C38, | | | | |
| and N46 | | | | |
| T20 | Fusion | Wild et al., Proc | Targets C- | YTSLIHSLIEESQN |
| (also | inhibitor | Natl Acad Sci USA. | terminal | QQEKNEQELLELD |
| known | | 1994 Oct 11; | heptad repeat | KWASLWNWF |
| as DP- | | 91(21): 9770-4. | region of HIV | (SEQ ID NO: 8412) |
| 178, | | Greenberg et al., | gp41 region | |
| Enfuvirtide, | | J Antimicrob | | |
| and | | Chemother. 2004 | | |
| Fuzeon) | | Aug; 54(2): 333-40. | | |
| | | Gochin et al., Curr | | |
| | | Top Med Chem. | | |
| | | 2011 Dec 1; | | |
| | | 11(24): 3022-3032. | | |
| C37H6 | Fusion | | | |
| | inhibitor | | | |
| CP32M | Fusion | | | |
| | inhibitor | | | |
| sifuvirtide | | Yao et al., J Biol | | |
| | | Chem. | | |
| | | 2012; 287: 6788-6796. | | |
| albuvirtide | | | | |
| 2DLT | | | | |
| AMD3100 | | | | |
| and | | | | |
| AMD070 | | | | |
| SCH-C | | | | |
| and | | | | |
| SCH-D | | | | |
| UK- | | | | |
| 427,857 | | | | |
| N36 | Fusion | Gochin et al., Curr | Targets N- | SGIVQQQNNLLRA |
| | inhibitor | Top Med Chem. | terminal | IEAQQHLLQLTVW |
| | | 2011 Dec 1; | heptad repeat | GIKQLQARIL (SEQ |
| | | 11(24): 3022-3032. | region of HIV | ID NO: 8413) |
| | | | gp41 region | |
| T21 | Fusion | | Targets N- | |
| | inhibitor | | terminal | |
| | | | heptad repeat | |
| | | | region of HIV | |
| | | | gp41 region | |
| CP621- | Fusion | | Target CHR | |
| 652 | inhibitor | | region of HIV | |
| | | | gp41 region | |
| CP628- | Fusion | | Target CHR | |
| 654 | inhibitor | | region of HIV | |
| | | | gp41 region | |
| C34 | Fusion | Gochin et al., Curr | Targets HR2 | WMEWDREINNYT |
| | inhibitor | Top Med Chem. | region of HIV | SLIHSLIEESQNQQ |
| | | 2011 Dec 1; | gp41 region | EKNEQELL (SEQ |
| | | 11(24): 3022-3032. | | ID NO: 8414) |
| DP | | | | YTSLIHSLIEESQN |
| | | | | QQEKNEQELLE |
| | | | | (SEQ ID NO: 8415) |
| DP107 | Fusion | | Targets c- | |
| | inhibitor | | terminal region | |
| | | | of HIV gp41- | |
| | | | HR1 inhibitor | |
| IZN36 | Fusion | | Traps pre- | |
| | inhibitor | | hairpin | |
| | | | intermediate | |
| N36ccg | Fusion | Su et al., J Virol | Traps pre- | |
| | inhibitor | 2015; 89: 5801-5811. | hairpin | |
| | | | intermediate | |
| SFT | Fusion | Su et al., J Virol | Target CHR | |
| | inhibitor | 2015; 89: 5801-5811. | region of HIV | |
| | | | gp41 region | |
| SC22EK | Fusion | Su et al., J Virol | Target CHR | |
| | inhibitor | 2015; 89: 5801-5811. | region of HIV | |
| | | | gp41 region | |
| MTSC22 | Fusion | Su et al., J Virol | Target CHR | |
| | inhibitor | 2015; 89: 5801-5811. | region of HIV | |
| | | | gp41 region | |
| MTSC21 | Fusion | Su et al., J Virol | Target CHR | |
| | inhibitor | 2015; 89: 5801-5811. | region of HIV | |
| | | | gp41 region | |
| MTSC19 | Fusion | Su et al., J Virol | Target CHR | |
| | inhibitor | 2015; 89: 5801-5811. | region of HIV | |
| | | | gp41 region | |
| HP23 | Fusion | Su et al., J Virol | Target CHR | |
| | inhibitor | 2015; 89: 5801-5811. | region of HIV | |
| | | | gp41 region | |
| HP22 | Fusion | Su et al., J Virol | Target CHR | |
| | inhibitor | 2015; 89: 5801-5811. | region of HIV | |
| | | | gp41 region | |
| HP23E | Fusion | Su et al., J Virol | Target CHR | |
| | inhibitor | 2015; 89: 5801-5811. | region of HIV | |
| | | | gp41 region | |
| T-1249 | Fusion | Gochin et al., Curr | | WQEWEQKI------------ |
| | inhibitor | Top Med Chem. | | TALLEQAQIQQEK |
| | | 2011 Dec 1; | | NEYELQKLDKWA |
| | | 11(24): 3022-3032. | | SLWEWF (SEQ ID |
| | | | | NO: 8416) |
| IQN17 | Fusion | Eckert et al., Proc | Targets N- | |
| | inhibitor | Natl Acad Sci USA. | terminal | |
| | | 2001 Sep 25; | heptad repeat | |
| | | 98(20): 11187-11192. | region of HIV | |
| | | | gp41 region | |
| IQN23 | Fusion | Eckert et al., Proc | Targets N- | |
| | inhibitor | Natl Acad Sci USA. | terminal | |
| | | 2001 Sep 25; | heptad repeat | |
| | | 98(20): 11187-11192. | region of HIV | |
| | | | gp41 region | |
| IQN36 | Fusion | Eckert et al., Proc | Targets N- | |
| | inhibitor | Natl Acad Sci USA. | terminal | |
| | | 2001 Sep 25; | heptad repeat | |
| | | 98(20): 11187-11192. | region of HIV | |
| | | | gp41 region | |
| IIN17 | Fusion | Eckert et al., Proc | Targets N- | |
| | inhibitor | Natl Acad Sci USA. | terminal | |
| | | 2001 Sep 25; | heptad repeat | |
| | | 98(20): 11187-11192. | region of HIV | |
| | | | gp41 region | |
| IQ22N17 | Fusion | Eckert et al., Proc | Targets N- | |
| | inhibitor | Natl Acad Sci USA. | terminal | |
| | | 2001 Sep 25; | heptad repeat | |
| | | 98(20): 11187-11192. | region of HIV | |
| | | | gp41 region | |
| II22N17 | Fusion | Eckert et al., Proc | Targets N- | |
| | inhibitor | Natl Acad Sci USA. | terminal | |
| | | 2001 Sep 25; | heptad repeat | |
| | | 98(20): 11187-11192. | region of HIV | |
| | | | gp41 region | |
| II15N17 | Fusion | Eckert et al., Proc | Targets N- | |
| | inhibitor | Natl Acad Sci USA. | terminal | |
| | | 2001 Sep 25; | heptad repeat | |
| | | 98(20): 11187-11192. | region of HIV | |
| | | | gp41 region | |
| IZN17 | Fusion | Eckert et al., Proc | Targets N- | |
| | inhibitor | Natl Acad Sci USA. | terminal | |
| | | 2001 Sep 25; | heptad repeat | |
| | | 98(20): 11187-11192. | region of HIV | |
| | | | gp41 region | |
| IZN23 | Fusion | Eckert et al., Proc | Targets N- | |
| | inhibitor | Natl Acad Sci USA. | terminal | |
| | | 2001 Sep 25; | heptad repeat | |
| | | 98(20): 11187-11192. | region of HIV | |
| | | | gp41 region | |
| IZN36 | Fusion | Eckert et al., Proc | Targets N- | |
| | inhibitor | Natl Acad Sci USA. | terminal | |
| | | 2001 Sep 25; | heptad repeat | |
| | | 98(20): 11187-11192. | region of HIV | |
| | | | gp41 region | |
| C46 and | Fusion | Brauer et al., | Target CHR | |
| C46- | inhibitor | Antimicrob. | region of HIV | |
| EHO | | Agents | gp41 region | |
| | | Chemother. | | |
| | | February 2013 vol. | | |
| | | 57 no. 2 679-688. | | |
| C37H6 | Fusion | Xiao et al., Bioorg | Binds HR1 | |
| | inhibitor | Med Chem Lett. | region of gp41 | |
| | | 2013 Nov 15; | and stabilizes | |
| | | 23(22): 10.1016. | pre-hairpin | |
| | | | structure to | |
| | | | inhibit | |
| | | | membrane | |
| | | | fusion | |
| CP32M | Fusion | Xiao et al., Bioorg | Binds HR1 | |
| | inhibitor | Med Chem Lett. | region of gp41 | |
| | | 2013 Nov 15; | and stabilizes | |
| | | 23(22): 10.1016. | pre-hairpin | |
| | | | structure to | |
| | | | inhibit | |
| | | | membrane | |
| | | | fusion | |
| tat-rev | siRNA | Anderson et al., | | |
| shRNA | | Mol Ther. 2007 | | |
| | | Jun; 15(6): 1182-8. | | |
| | e-shRNA | | | |
| | hRNA | | | |
| | shRNA | | | |
| | AgoshRNA | | | |
| Ribozyme | Ribozyme | | | |
| vs. | | | | |
| tat/vpr | | | | |
| Ribozyme | | | | |
| vs. | | | | |
| rev/tat | | | | |
| Ribozyme | | | | |
| vs. | | | | |
| U5 | | | | |
| leader | | | | |
| sequence | | | | |
| neutralizing | Anti- | Sullenger BA, | | |
| the | HIV-1 | Gallardo HF, | | |
| action of | aptamers- | Ungers GE, Gilboa E | | |
| the HIV-1 | HIV-1 | Cell. 1990 Nov 2; | | |
| proteins | trans- | 63(3): 601-8. | | |
| Tat | activation | | | |
| | response | | | |
| | element | | | |
| | (TAR) | | | |
| neutralizing | Anti- | Lee TC, Sullenger | | |
| the | HIV-1 | BA, Gallardo HF, | | |
| action of | aptamers | Ungers GE, Gilboa E | | |
| the HIV-1 | | New Biol. 1992 | | |
| proteins | | Jan; 4(1): 66-74. | | |
| Rev | | | | |
| | | Michienzi A, Li S, | | |
| | | Zaia JA, Rossi JJ | | |
| | | Proc Natl Acad Sci | | |
| | | USA. 2002 Oct | | |
| | | 29; 99(22): 14047-52. | | |
| | | Bai J, Banda N, | | |
| | | Lee NS, Rossi J, | | |
| | | Akkina R | | |
| | | Mol Ther. 2002 | | |
| | | Dec; 6(6): 770-82. | | |
| Tar | | Banerjea A, Li MJ, | | |
| Decoy | | Remling L, Rossi | | |
| | | J, Akkina R | | |
| | | AIDS Res Ther. | | |
| | | 2004 Dec 17; | | |
| | | 1(1): 2. | | |
| TAR | | | | |
| aptamer | | | | |
| TRIM5a | | | | |
| Multiplex | | Walker et al., J | | |
| | | Virol. 2012 May; | | |
| | | 86(10): 5719-29. | | |
| Not | | | | |
| peptides: | | | | |
| PRO | Block | | | |
| 542 | CD4 | | | |
| | binding | | | |
| BMS- | | | | |
| 806 | | | | |
| TNX- | | | | |
| 355 | | | | |

[0470] In the case of autologous HSC modification, modified cells are infused into the subject and are resistant to HIV. In the case of allogeneic HSC modification, modified cells are reinfused into the subject and are resistant to HIV. The aim is to ameliorate or cure HIV in a subject.

### (4.1d) CCR5 Knock Out With Concomitant Knock-In of Drug Resistance Selectable Marker for Enabling Selection of Modified HSCs:

[0471] In certain embodiments, in HSCs or lymphoid progenitors or T lymphocytes ex vivo, the CCR5 gene is knocked out using the methods described herein, e.g., NHEJ-mediated knock-out, and a drug resistance selectable marker, encoded in a transgene expression set, e.g., chemotherapy resistance gene P140K driven by a EFS promoter, is inserted at the CCR5 gene locus using homology directed repair. In certain embodiments, in HSCs or lymphoid progenitors or T lymphocytes ex vivo, the CCR5 gene is knocked down using the methods described herein, e.g., dCas9-mediated knock-down, and a drug resistance selectable marker encoded in a transgene expression set, e.g., chemotherapy resistance gene P140K driven by a EFS promoter, is inserted at the CCR5 gene locus using homology directed repair.

[0472] The cassette expressing a drug resistance selectable marker is inserted in the CCR5 gene locus which is a safe harbor locus. The cassette expressing a resistance selectable marker is inserted in a safe harbor locus.

[0473] In certain embodiments, the drug resistance selectable marker is under the expression of endogenous CCR5 promoter. In certain embodiments, the drug resistance selectable marker is under the expression of a EFS promoter that is an element of the transgene expression cassette.

[0474] HSCs are modified ex vivo with the method, knocking out the CCR5 gene and knocking in a gene encoding a drug resistance selectable marker, e.g., chemotherapy resistance gene P140K.

[0475] (a) Modified HSCs (e.g., CCR5−/−/P140K knock-in+/+) are exposed to chemotherapy ex vivo. Chemotherapy exposure can destroy unedited cells and only edited cells can be preserved. Only HSCs that have been modified can survive. Selected, modified HSCs can have all have CCR5 gene knock out and can be administered to the subject.

[0476] (b) Modified HSCs (e.g., CCR5−/−/P140K knock-in+/+) are transplanted into subject. HSCs are exposed to chemotherapy in vivo. HSCs that have been modified can survive, as chemotherapy exposure can destroy unedited cells. Modified HSCs can have CCR5 gene knock out.

[0477] Modified HSCs (e.g., CCR5−/−/P140K knock-in+/+) are HIV resistant. In the case of autologous HSC modification, modified cells are re-infused into the subject and can be resistant to HIV. In the case of allogeneic HSC modification, modified cells are infused into the subject and can be resistant to HIV. The aim is to ameliorate or cure HIV in a subject.

(4.2) Knocking Down CCR5 Mediated by an Enzymatically Inactive Cas9 (eiCas9) Molecule

[0478] A targeted knockdown approach reduces or eliminates expression of functional CCR5 gene product. As described herein, in certain embodiments, a targeted knockdown is mediated by targeting an enzymatically inactive Cas9 (eiCas9) molecule or an eiCas9 fused to a transcription repressor domain or chromatin modifying protein to alter transcription, e.g., to block, reduce, or decrease transcription, of the CCR5 gene.

[0479] Methods and compositions discussed herein may be used to alter the expression of the CCR5 gene to treat or prevent HIV infection or AIDS by targeting a promoter region of the CCR5 gene. In certain embodiments, the promoter region is targeted to knock down expression of the CCR5 gene. A targeted knockdown approach reduces or eliminates expression of functional CCR5 gene product. As described herein, in certain embodiments, a targeted knockdown is mediated by targeting an enzymatically inactive Cas9 (eiCas9) or an eiCas9 fused to a transcription repressor domain or chromatin modifying protein to alter transcription, e.g., to block, reduce, or decrease transcription, of the CCR5 gene.

[0480] In certain embodiments, one or more eiCas9s are used to block binding of one or more endogenous transcription factors. In certain embodiments, an eiCas9 can be fused to a chromatin modifying protein. Altering chromatin status can result in decreased expression of the target gene. One or more eiCas9s fused to one or more chromatin modifying proteins can be used to alter chromatin status.

### (4.3) Introduction of One or More Mutations in CCR5 Gene

[0481] In certain embodiments, the method comprises introducing one or more mutations in the CCR5 gene. In cetain embodiments, the one or more mutations comprise one or more protective mutations. In cetain embodiments, the one or more protective mutations comprise a delta32 mutation.

### (4.3a) NHEJ-Mediated Creation of Naturally Occurring Delta 32 Mutation in CCR5 Gene

[0482] In certain embodiments, the method comprises deleting (e.g., NHEJ-mediated deletion) a genomic sequence within the coding sequence of the CCR5 gene, e.g., a NHEJ-mediated 32-base pair deletion at cDNA position 794-825 (deletion of codons 175-185). As described herein, in certain embodiments, the method comprises introduction of two sets of breaks (e.g., a pair of double strand breaks, one double strand break or a pair of single strand breaks, or two pairs of single strand breaks) to flank a region of the CCR5 gene (e.g., a coding region). In certain embodiments, NHEJ-mediated repair of the break(s) alters the CCR5 gene to generate a naturally occurring mutation, the delta32 mutation. The delta32 mutation is a 32-base pair deletion that, during translation, leads to a frameshift after codon 174, inclusion of 31 novel amino acids, and premature truncation of the CCR5 protein. The truncated CCR5 receptor does not traffic to the cell membrane and cannot act as a co-receptor for HIV. The delta 32 mutation in CCR5 confers resistance to HIV (Samson et al., Nature 382: 722-725, 1996). The method of deletion (e.g., NHEJ-mediated deletion) of base pairs 794-825 in the CCR5 gene can recreate a naturally occurring mutation and confer resistance to HIV. The method can create a delta 32 mutation in a single allele of CCR5 (CCR5^{+/Δ32}) or a mutation in both alleles of CCR5 (CCR5^{Δ32/Δ32}). The method can be used in a subject suffering from HIV, to ameliorate or cure disease. The method can be used in a subject who is not suffering from HIV, to prevent the disease.

[0483] The CCR5 delta32 protective eletion has been found to be associated with a slower progression of disease in certain autoimmune and infectious diseases, including Multiple Sclerosis, transplant rejection and Hepatitis C (Barcellos et al., Immunogenetics 51: 281-288, 2000. Fischereder et al., Neurology 61: 238-240, 2003. Goulding et al., Gut 54: 1157-1161, 2005.). The methods described herein can be used to create a protective delta32 deletion in CCR5 gene to ameliorate Multiple Sclerosis, ameliorate Hepatitis C, slow the progression of transplant loss, or slow progression of other autoimmune and/or infectious diseases.

[0484] In certain embodiments, two double strand breaks are introduced (e.g., positioned by two gRNA molecules) at or in close proximity to a CCR5 target position in the CCR5 gene. In certain embodiment, the CCR5 target position comprise a 32 base pair region at c. 794-825. In certain embodiments, two gRNA molecules (e.g., with one or two Cas9 nucleases that are not Cas9 nickases) are used to create two double strand breaks to flank a CCR5 target position, e.g., the gRNA molecules are configured such that one double strand break is positioned upstream (e.g., within 500 bp upstream, e.g., within 200 bp upstream) and a second double strand break is positioned downstream (e.g., within 500 bp downstream, e.g., within 200 bp downstream) of the CCR5 target position. In certain embodiments, the breaks are positioned to avoid unwanted target chromosome elements, such as repeat elements, e.g., an Alu repeat.

[0485] In certain embodiments, one double strand break and two single strand breaks are introduced (e.g., positioned by three gRNA molecules) at or in close proximity to a CCR5 target position in the CCR5 gene. In certain embodiments, the CCR5 target position comprises a32 base pair region at c. 794-825. In certain embodiments, three gRNA molecules (e.g., with a Cas9 nuclease other than a Cas9 nickase and one or two Cas9 nickases) to create one double strand break and two single strand breaks to flank a CCR5 target position, e.g., the gRNA molecules are configured such that the double strand break is positioned upstream or downstream of (e.g., within 500 bp, e.g., within 200 bp upstreamor downstream) of the CCR5 target position, and the two single strand breaks are positioned at the opposite site, e.g., downstream or upstream (e.g., within 500 bp, e.g., within 200 bp downstream or upstream), of the CCR5 target position. In certain embodiments, the breaks are positioned to avoid unwanted target chromosome elements, such as repeat elements, e.g., an Alu repeat.

[0486] In certain embodiments, four single strand breaks are introduced (e.g., positioned by four gRNA molecules) at or in close proximity to a CCR5 target position in the CCR5 gene. In certain embodiments, the CCR5 target position comprises a 32 base pair region at c. 794-825. In certain embodiments, four gRNA molecule (e.g., with one or more Cas9 nickases are used to create four single strand breaks to flank a CCR5 target position in the CCR5 gene, e.g., the gRNA molecules are configured such that a first and second single strand breaks are positioned upstream (e.g., within 500 bp upstream, e.g., within 200 bp upstream) of the CCR5 target position, and a third and a fourth single stranded breaks are positioned downstream (e.g., within 500 bp downstream, e.g., within 200 bp downstream) of the CCR5 target position. In certain embodiments, the breaks are positioned to avoid unwanted target chromosome elements, such as repeat elements, e.g., an Alu repeat.

[0487] In certain embodiments, two or more (e.g., three or four) gRNA molecules are used with one Cas9 molecule. In certain embodiments, when two ore more (e.g., three or four) gRNAs are used with two or more Cas9 molecules, at least one Cas9 molecule is from a different species than the other Cas9 molecule(s). For example, when two gRNA molecules are used with two Cas9 molecules, one Cas9 molecule can be from one species and the other Cas9 molecule can be from a different species. Both Cas9 species are used to generate a single or double-strand break, as desired.

### (4.3b) HDR-Mediated Introduction of Delta 32 Mutation to CCR5

[0488] Subjects who are homozygous for the CCR5 Δ32 (CCR5 Δ32/Δ32) mutation are immune to HIV-1 (Samson et al., Nature. 1996 Aug. 22; 382(6593):722-5). The CCR5 delta32 mutation is a naturally occurring 32-base pair deletion that, during translation, leads to a frameshift after codon 174, inclusion of 31 novel amino acids, and premature truncation of the CCR5 protein. The CCR5 receptor does not traffic to T-cell membrane. The CCR5 Δ32 mutation confers resistance to HIV because HIV cannot use the CCR5-coreceptor for viral entry into T-cells. An individual with late stage HIV received a HSC transplantation (to treat leukemia related to HIV) from a subject who was homozygous for the CCR5 Δ32 mutation. Following the transplant, the individual appears to have controlled HIV, with no evidence of HIV and no need for antiretroviral therapy for several years (Hutter, et al., N Engl J Med. 2009 Feb. 12; 360(7):692-8. Allers et al., Blood. 2011 Mar. 10; 117(10):2791-9). The methods can recreate the naturally occurring CCR5 Δ32 mutation in a subject to confer resistance to HIV and/or to cure HIV infection.

[0489] The method of deletion, e.g., HDR-mediated deletion of base pairs c.794-825 in the CCR5 gene recreates a naturally occurring mutation and confers resistance to HIV. The method can create a delta 32 mutation in a single allele of CCR5 (CCR5+/Δ32) or a mutation in both alleles of CCR5 (CCR5 Δ32/Δ32). The method can be used in a subject with HIV, to ameliorate or cure disease. The method can be used in a subject who is not suffering from HIV, to prevent disease.

[0490] In certain embodiments, the method uses homology directed repair to target the coding region of the CCR5 gene with the aim to produce a truncated CCR5 protein product. In certain embodiments, the coding region of the CCR5 gene is targeted to create a mutation, e.g., a deletion that is a Δ32 mutation at position c.794-825 (deletion of codons 175-185), by homology directed repair. The method recreates a naturally occurring mutation in CCR5 known as the Δ32 mutation. The method can disrupt a CCR5 gene so that the truncated protein product, e.g., the truncated CCR5 receptor, does not traffic to the cell membrane. T-cells lacking a CCR5 receptor can be resistant to HIV, as HIV utilizes the CCR5 receptor as a co-receptor, along with CD4, for viral entry into T-cells. The method ameliorates or cures HIV.

[0491] In certain embodiments, the targeting domain of the gRNA molecule is configured to provide a cleavage event, e.g., a double strand break or a single strand break, sufficiently close to (e.g., either 5′ or 3′ to) the target the CCR5 gene for introduction of the Δ32 mutation in the CCR5 gene. In certain embodiments, the targeting domain is configured such that a cleavage event, e.g., a double strand or single strand break, is positioned within 1, 2, 3, 4, 5, 10, 15, 20, 25, 30, 35, 40, 45, 50, 60, 70, 80, 90, 100, 150, 200, 250, 300, 350, 400, 450 or 500 nucleotides of the target position in the CCR5 gene. The break, e.g., a double strand or single strand break, can be positioned upstream or downstream of the target position in the CCR5 gene.

[0492] In certain embodiments, a second, third and/or fourth gRNA molecule is configured to provide a cleavage event, e.g., a double strand break or a single strand break, sufficiently close to (e.g., either 5′ or 3′ to) the target position in the CCR5 gene for the introduction of the Δ32 mutation. In certain embodiments, the targeting domain is configured such that a cleavage event, e.g., a double strand or single strand break, is positioned within 1, 2, 3, 4, 5, 10, 15, 20, 25, 30, 35, 40, 45, 50, 60, 70, 80, 90, 100, 150, 200, 250, 300, 350, 400, 450 or 500 nucleotides of the target position in the CCR5 gene. The break, e.g., a double strand or single strand break, can be positioned upstream or downstream of the target position in the CCR5 gene.

[0493] In certain embodiments, a single strand break is accompanied by an additional single strand break, positioned by a second, third and/or fourth gRNA molecule, as discussed below. For example, the targeting domains bind configured such that a cleavage event, e.g., the two single strand breaks, are positioned within 1, 2, 3, 4, 5, 10, 15, 20, 25, 30, 35, 40, 45, 50, 60, 70, 80, 90, 100, 150, 200, 250, 300, 350, 400, 450 or 500 nucleotides of the target position in the CCR5 gene for the introduction of the Δ32 mutation. In certain embodiments, the first and second gRNA molecules are configured such, that when guiding a Cas9 nickase, a single strand break can be accompanied by an additional single strand break, positioned by a second gRNA, sufficiently close to one another to result in an alteration of the target position in the CCR5 gene. In certain embodiments, the first and second gRNA molecules are configured such that a single strand break positioned by said second gRNA is within 1, 2, 3, 4, 5, 10, 15, 20, 25, 30, 35, 40, 45, 50, 60, 70, 80, 90, 100, 150, 200, 250, 300, 350, 400, 450 or 500 nucleotides of the break positioned by said first gRNA molecule, e.g., when the Cas9 is a nickase. In certain embodiments, the two gRNA molecules are configured to position cuts at the same position, or within a few nucleotides of one another, on different strands, e.g., essentially mimicking a double strand break.

[0494] In certain embodiments, a double strand break can be accompanied by an additional double strand break, positioned by a second, third and/or fourth gRNA molecule, as is discussed below. For example, the targeting domain of a first gRNA molecule is configured such that a double strand break is positioned upstream of the target position in the CCR5 gene within 1, 2, 3, 4, 5, 10, 15, 20, 25, 30, 35, 40, 45, 50, 60, 70, 80, 90, 100, 150, 200, 250, 300, 350, 400, 450 or 500 nucleotides of the target position; and the targeting domain of a second gRNA molecule is configured such that a double strand break is positioned downstream the target position in the CCR5 gene, within 1, 2, 3, 4, 5, 10, 15, 20, 25, 30, 35, 40, 45, 50, 60, 70, 80, 90, 100, 150, 200, 250, 300, 350, 400, 450 or 500 nucleotides of the target position.

[0495] In certain embodiments, a double strand break can be accompanied by two additional single strand breaks, positioned by a second gRNA molecule and a third gRNA molecule. For example, the targeting domain of a first gRNA molecule is configured such that a double strand break is positioned upstream of the target position in the CCR5 gene, e.g., within 1, 2, 3, 4, 5, 10, 15, 20, 25, 30, 35, 40, 45, 50, 60, 70, 80, 90, 100, 150, 200, 250, 300, 350, 400, 450 or 500 nucleotides of the target position; and the targeting domains of a second and third gRNA molecule are configured such that two single strand breaks are positioned downstream of the target position in the CCR5 gene, within 1, 2, 3, 4, 5, 10, 15, 20, 25, 30, 35, 40, 45, 50, 60, 70, 80, 90, 100, 150, 200, 250, 300, 350, 400, 450 or 500 nucleotides of the target position. In certain embodiments, the targeting domain of the first, second and third gRNA molecules are configured such that a cleavage event, e.g., a double strand or single strand break, is positioned, independently for each of the gRNA molecules.

[0496] In certain embodiments, a first and second single strand breaks can be accompanied by two additional single strand breaks positioned by a third gRNA molecule and a fourth gRNA molecule. For example, the targeting domain of a first and second gRNA molecule are configured such that two single strand breaks are positioned upstream of the target position in the CCR5 gene, e.g., within 1, 2, 3, 4, 5, 10, 15, 20, 25, 30, 35, 40, 45, 50, 60, 70, 80, 90, 100, 150, 200, 250, 300, 350, 400, 450 or 500 nucleotides of the target position in the CCR5 gene; and the targeting domains of a third and fourth gRNA molecule are configured such that two single strand breaks are positioned downstream of the target position in the CCR5 gene, e.g., within 1, 2, 3, 4, 5, 10, 15, 20, 25, 30, 35, 40, 45, 50, 60, 70, 80, 90, 100, 150, 200, 250, 300, 350, 400, 450 or 500 nucleotides of the target position in the CCR5 gene.

[0497] In certain embodiments, a mutation in the CCR5 gene, e.g., Δ32 mutation, is introduced using an exogenously provided template nucleic acid, e.g., by HDR. In certain embodiments, the template nucleic acid is a single strand oligonucleotide.

[0498] In certain embodiments, an eaCas9 molecule, e.g., an eaCas9 molecule described herein, is used. In certain embodiments, the eaCas9 molecule comprises HNH-like domain cleavage activity but has no, or no significant, N-terminal RuvC-like domain cleavage activity. In certain embodiments, the eaCas9 molecule is an HNH-like domain nickase. In certain embodiments, the eaCas9 molecule comprises a mutation at D10 (e.g., D10A). In certain embodiments, the eaCas9 molecule comprises N-terminal RuvC-like domain cleavage activity but has no, or no significant, HNH-like domain cleavage activity. In certain embodiments, the eaCas9 molecule is an N-terminal RuvC-like domain nickase. In certain embodiments, the eaCas9 molecule comprises a mutation at H840 (e.g., H840A) or N863 (e.g., N863A).

### 5. Methods of Targeting CXCR4

[0499] As disclosed herein, the CXCR4 gene can be altered by gene editing, e.g., using CRISPR-Cas9-mediated methods as described herein.

[0500] Methods, genome editing systems, and compositions discussed herein, provide for altering a CXCR4 target position in the CXCR4 gene. A CXCR4 target position can be targeted (e.g., altered) by gene editing, e.g., using CRISPR-Cas9 mediated methods, genome editing systems, and compositions described herein.

[0501] Disclosed herein are methods for targeting (e.g., altering) a CXCR4 target position in the CXCR4 gene. Targeting (e.g., aAltering a CXCR4 target position can be achieved by one or more the following approaches:

[0502] (5.1) knocking out the CXCR4 gene:
[0503] (5.1a) insertion or deletion (e.g., NHEJ-mediated insertion or deletion) of one or more nucleotides in close proximity to or within the early coding region of the CXCR4 gene,
[0504] (5.1b) deletion (e.g., NHEJ-mediated deletion) of a genomic sequence including at least a portion of the CXCR4 gene, and
[0505] (5.1c) deletion (e.g., NHEJ-mediated deletion) of amino acids in N-terminus in the CXCR4 gene,

[0506] (5.2) knocking down the CXCR4 gene mediated by enzymatically inactive Cas9 (eiCas9) molecule or an eiCas9-fusion, and

[0507] (5.3) introduction of one or more mutations in the CXCR4 gene.

[0508] In certain embodiments, methods described herein introduce one or more breaks near the early coding region in at least one allele of the CXCR4 gene. In certain embodiments, methods described herein introduce two or more breaks to flank at least a portion of the CXCR4 gene. The two or more breaks remove (e.g., delete) a genomic sequence including at least a portion of the CXCR4 gene. In certain embodiments, methods described herein comprise knocking down the CXCR4 gene mediated by enzymatically inactive Cas9 (eiCas9) molecule or an eiCas9-fusion protein by targeting the promoter region of CXCR4 target knockdown position. Methods 3a, 3b and 4 described herein result in targeting (e.g., alteration) of the CXCR4 gene.

[0509] The targeting (e.g., alteration) of the CXCR4 gene can be mediated by any mechanism. Exemplary mechanisms that can be associated with the alteration of the CXCR4 gene include, but are not limited to, NHEJ (e.g., classical or alternative), MMEJ, HDR (e.g., endogenous donor template mediated), SDSA, single strand annealing or single strand invasion.

### (5.1a) Knocking Out CXCR4 by Introducing an Indel in the CXCR4 Gene

[0510] In certain embodiments, the method comprises introducing an insertion of one more nucleotides in close proximity to the CXCR4 target knockout position (e.g., the early coding region) of the CXCR4 gene. As described herein, in certain embodiments, the method comprises the introduction of one or more breaks (e.g., single strand breaks or double strand breaks) sufficiently close to (e.g., either 5′ or 3′ to) the early coding region of the CXCR4 target knockout position, such that the break-induced indel could be reasonably expected to span the CXCR4 target knockout position (e.g., the early coding region). In certain embodiments, NHEJ-mediated repair of the break(s) allows for the NHEJ-mediated introduction of an indel in close proximity to within the early coding region of the CXCR4 target knockout position.

[0511] In certain embodiments, the method comprises introducing a deletion of a genomic sequence comprising at least a portion of the CXCR4 gene. As described herein, in certain embodiments, the method comprises the introduction of two double stand breaks—one 5′ and the other 3′ to (i.e., flanking) the CXCR4 target position. In certain embodiments, two gRNAs, e.g., unimolecular (or chimeric) or modular gRNA molecules, are configured to position the two double strand breaks on opposite sides of the CXCR4 target knockout position in the CXCR4 gene.

[0512] In certain embodiments, a single strand break is introduced (e.g., positioned by one gRNA molecule) at or in close proximity to a CXCR4 target position in the CXCR4 gene. In certain embodiments, a single gRNA molecule (e.g., with a Cas9 nickase) is used to create a single strand break at or in close proximity to the CXCR4 target position, e.g., the gRNA is configured such that the single strand break is positioned either upstream (e.g., within 500 bp upstream, e.g., within 200 bp upstream) or downstream (e.g., within 500 bp downstream, e.g., within 200 bp downstream) of the CXCR4 target position. In certain embodiments, the break is positioned to avoid unwanted target chromosome elements, such as repeat elements, e.g., an Alu repeat.

[0513] In certain embodiments, a double strand break is introduced (e.g., positioned by one gRNA molecule) at or in close proximity to a CXCR4 target position in the CXCR4 gene. In certain embodiments, a single gRNA molecule (e.g., with a Cas9 nuclease other than a Cas9 nickase) is used to create a double strand break at or in close proximity to the CXCR4 target position, e.g., the gRNA molecule is configured such that the double strand break is positioned either upstream (e.g., within 500 bp upstream, e.g., within 200 bp upstream) or downstream of (e.g., within 500 bp downstream, e.g., within 200 bp downstream) of a CXCR4 target position. In certain embodiments, the break is positioned to avoid unwanted target chromosome elements, such as repeat elements, e.g., an Alu repeat.

[0514] In certain embodiments, two single strand breaks are introduced (e.g., positioned by two gRNA molecules) at or in close proximity to a CXCR4 target position in the CXCR4 gene. In certain embodiments, two gRNA molecules (e.g., with one or two Cas9 nickcases) are used to create two single strand breaks at or in close proximity to the CXCR4 target position, e.g., the gRNAs molecules are configured such that both of the single strand breaks are positioned e.g., within 500 bp upstream, e.g., within 200 bp upstream) or downstream (e.g., within 500 bp downstream, e.g., within 200 bp downstream) of the CXCR4 target position. In certain embodiments, two gRNA molecules (e.g., with two Cas9 nickcases) are used to create two single strand breaks at or in close proximity to the CXCR4 target position, e.g., the gRNAs molecules are configured such that one single strand break is positioned upstream (e.g., within 200 bp upstream) and a second single strand break is positioned downstream (e.g., within 200 bp downstream) of the CXCR4 target position. In certain embodiments, the breaks are positioned to avoid unwanted target chromosome elements, such as repeat elements, e.g., an Alu repeat.

[0515] In certain embodiments, two double strand breaks are introduced (e.g., positioned by two gRNA molecules) at or in close proximity to a CXCR4 target position in the CXCR4 gene. In certain embodiments, two gRNA molecules (e.g., with one or two Cas9 nucleases that are not Cas9 nickases) are used to create two double strand breaks to flank a CXCR4 target position, e.g., the gRNA molecules are configured such that one double strand break is positioned upstream (e.g., within 500 bp upstream, e.g., within 200 bp upstream) and a second double strand break is positioned downstream (e.g., within 500 bp downstream, e.g., within 200 bp downstream) of the CXCR4 target position. In certain embodiments, the breaks are positioned to avoid unwanted target chromosome elements, such as repeat elements, e.g., an Alu repeat.

[0516] In certain embodiments, one double strand break and two single strand breaks are introduced (e.g., positioned by three gRNA molecules) at or in close proximity to a CXCR4 target position in the CXCR4 gene. In certain embodiments, three gRNA molecules (e.g., with a Cas9 nuclease other than a Cas9 nickase and one or two Cas9 nickases) to create one double strand break and two single strand breaks to flank a CXCR4 target position, e.g., the gRNA molecules are configured such that the double strand break is positioned upstream or downstream of (e.g., within 500 bp, e.g., within 200 bp upstreamor downstream) of the CXCR4 target position, and the two single strand breaks are positioned at the opposite site, e.g., downstream or upstrea m (e.g., within 500 bp, e.g., within 200 bp downstream or upstream), of the CXCR4 target position. In certain embodiments, the breaks are positioned to avoid unwanted target chromosome elements, such as repeat elements, e.g., an Alu repeat.

[0517] In certain embodiments, four single strand breaks are introduced (e.g., positioned by four gRNA molecules) at or in close proximity to a CXCR4 target position in the CXCR4 gene. In certain embodiments, four gRNA molecule (e.g., with one or more Cas9 nickases are used to create four single strand breaks to flank a CXCR4 target position in the CXCR4 gene, e.g., the gRNA molecules are configured such that a first and second single strand breaks are positioned upstream (e.g., within 500 bp upstream, e.g., within 200 bp upstream) of the CXCR4 target position, and a third and a fourth single stranded breaks are positioned downstream (e.g., within 500 bp downstream, e.g., within 200 bp downstream) of the CXCR4 target position. In certain embodiments, the breaks are positioned to avoid unwanted target chromosome elements, such as repeat elements, e.g., an Alu repeat.

[0518] In certain embodiments, two or more (e.g., three or four) gRNA molecules are used with one Cas9 molecule. In certain embodiments, when two ore more (e.g., three or four) gRNAs are used with two or more Cas9 molecules, at least one Cas9 molecule is from a different species than the other Cas9 molecule(s). For example, when two gRNA molecules are used with two Cas9 molecules, one Cas9 molecule can be from one species and the other Cas9 molecule can be from a different species. Both Cas9 species are used to generate a single or double-strand break, as desired.

### (5.1b) Knocking Out CXCR4 by Deleting a Genomic Sequence Including at Least a Portion of the CXCR4 Gene

[0519] In certain embodiments, the method comprises deleting (e.g., NHEJ-mediated deletion) a genomic sequence including at least a portion of the CXCR4 gene. As described herein, in certain embodiments, the method comprises the introduction two sets of breaks (e.g., a pair of double strand breaks, one double strand break or a pair of single strand breaks, or two pairs of single strand breaks) to flank a region of the CXCR4 gene (e.g., a coding region, e.g., an early coding region, or a non-coding region, e.g., a non-coding sequence of the CXCR4 gene, e.g., a promoter, an enhancer, an intron, a 3′UTR, and/or a polyadenylation signal). In certain embodiments, NHEJ-mediated repair of the break(s) allows for alteration of the CXCR4 gene as described herein, which reduces or eliminates expression of the gene, e.g., to knock out one or both alleles of the CXCR4 gene.

[0520] In certain embodiments, two double strand breaks are introduced (e.g., positioned by two gRNA molecules) at or in close proximity to a CXCR4 target position in the CXCR4 gene. In certain embodiments, two gRNA molecules (e.g., with one or two Cas9 nucleases that are not Cas9 nickases) are used to create two double strand breaks to flank a CXCR4 target position, e.g., the gRNA molecules are configured such that one double strand break is positioned upstream (e.g., within 500 bp upstream, e.g., within 200 bp upstream) and a second double strand break is positioned downstream (e.g., within 500 bp downstream, e.g., within 200 bp downstream) of the CXCR4 target position. In certain embodiments, the breaks are positioned to avoid unwanted target chromosome elements, such as repeat elements, e.g., an Alu repeat.

[0521] In certain embodiments, one double strand break and two single strand breaks are introduced (e.g., positioned by three gRNA molecules) at or in close proximity to a CXCR4 target position in the CXCR4 gene. In certain embodiments, three gRNA molecules (e.g., with a Cas9 nuclease other than a Cas9 nickase and one or two Cas9 nickases) to create one double strand break and two single strand breaks to flank a CXCR4 target position, e.g., the gRNA molecules are configured such that the double strand break is positioned upstream or downstream of (e.g., within 500 bp, e.g., within 200 bp upstreamor downstream) of the CXCR4 target position, and the two single strand breaks are positioned at the opposite site, e.g., downstream or upstrea m (e.g., within 500 bp, e.g., within 200 bp downstream or upstream), of the CXCR4 target position. In certain embodiments, the breaks are positioned to avoid unwanted target chromosome elements, such as repeat elements, e.g., an Alu repeat.

[0522] In certain embodiments, four single strand breaks are introduced (e.g., positioned by four gRNA molecules) at or in close proximity to a CXCR4 target position in the CXCR4 gene. In certain embodiments, four gRNA molecule (e.g., with one or more Cas9 nickases are used to create four single strand breaks to flank a CXCR4 target position in the CXCR4 gene, e.g., the gRNA molecules are configured such that a first and second single strand breaks are positioned upstream (e.g., within 500 bp upstream, e.g., within 200 bp upstream) of the CXCR4 target position, and a third and a fourth single stranded breaks are positioned downstream (e.g., within 500 bp downstream, e.g., within 200 bp downstream) of the CXCR4 target position. In certain embodiments, the breaks are positioned to avoid unwanted target chromosome elements, such as repeat elements, e.g., an Alu repeat.

[0523] In certain embodiments, two or more (e.g., three or four) gRNA molecules are used with one Cas9 molecule. In certain embodiments, when two ore more (e.g., three or four) gRNAs are used with two or more Cas9 molecules, at least one Cas9 molecule is from a different species than the other Cas9 molecule(s). For example, when two gRNA molecules are used with two Cas9 molecules, one Cas9 molecule can be from one species and the other Cas9 molecule can be from a different species. Both Cas9 species are used to generate a single or double-strand break, as desired.

### (5.1c) NHEJ-Mediated Deletion of Amino Acids in N-Terminus in the CXCR4 Gene

[0524] In certain embodiments, the method comprises ex vivo modification of autologous or allogeneic T-cells to introduce a deletion in the N-terminus of the CXCR4 gene. (See Example 9 for editing of T cells.) Alternatively or additionally, the method comprises ex vivo modification of autologous or allogeneic HSCs to introduce a deletion in the N-terminus of the CXCR4 gene, followed by differentiation of the modified HSCs into lymphoid progenitor cells and/or T cells. The method can also be harvest of autologous or allogeneic HSCs, differentiation of the modified HSCs into lymphoid progenitor cells and/or T cells and modification to introduce a deletion in the N-terminus of the CXCR4 gene. The modified allogeneic or autologous lymphoid progenitor cells and/or T-cells are dosed to a subject with HIV to ameliorate disease.

[0525] In certain embodiments, the method comprises introduction a deletion, e.g., deletion of amino acid residues 2-9, deletion of amino acid residues 2-20, deletion of amino acid residues 2-24, deletion of amino acid residues 4-20, deletion of amino acid residues 4-36, or deletion of amino acid residues 10-20, by NHEJ-mediated CRISPR/Cas9 deletion. The deletion disrupts HIV gp120 binding to coreceptor CXCR4. Creation of a deletion mutation in the CXCR4 coreceptor N-terminus binding domain can alter binding kinetics between CXCR4 and HIV envelope protein gp120, decreasing strength of binding, decreasing efficiency of binding and/or decreasing frequency of binding between CXCR4 and HIV. Alteration of binding between CXCR4 and HIV gp120 by modification of amino acid residues 2-36 on CXCR4 leads to decreased viral entry into cells (Choi et al., J. Virol. 2005;79:15398-15404. Zhou et al., J. Biol, Chem, 2001;276:42826-42833.). The methods create a deletion in the CXCR4 gene in key binding domains for HIV gp120 binding and lead to decreased HIV infectivity, and decreased symptoms of disease. The methods ameliorate or cure HIV infection. The methods can be particularly relevant in late-stage HIV, in which CXCR4 coreceptor binding tends to represent the majority of HIV coreceptor activity in a subject (Connor et al. J Exp Med. 1997 Feb. 17; 185(4):621-8).

[0526] Creation of a deletion mutation in the CXCR4 coreceptor N-terminus binding domain can disrupt binding of SDF1 (CXCR12) to CXCR4, as a critical binding domain for SDF1 is the N-terminus of the CXCR4 receptor. CXCR4-SDF1 binding mediates HSC, lymphoid and myeloid cell migration out of the bone marrow and from the peripheral blood into tissue. The main role of CXCR4-SDF1 binding can be migration of myeloid lineage cells out of the bone marrow, as genetic mutations in CXCR4 lead to WHIM syndrome, which is characterized by peripheral neutropenia and abundant mature myeloid cells in the marrow (O'Regan et al., Am. J. Dis. Child. 131: 655-658, 1977). In certain embodiments, the method is used to replace cells in the peripheral compartment that are lymphoid progenitor cells and/or T cells and in an acute or subacute setting. In certain embodiments, HSCs are not modified by this method, thereby permitting cells of the myeloid lineage to preserve migration capabilities.

[0527] In certain embodiments, use of this method (e.g., deletion of N-terminal amino acids 2-9, 2-20, 2-24, 4-20 4-36, or 10-20 of the CXCR4 gene) is used in lymphoid cells and/or T-cells in an acute or subacute setting. Benefit of this method in short-term therapy in a subject with severe disease outweighs the risks of interrupting SDF1 interaction with CXCR4. In addition, HSCs derived from the subject bone marrow can retain unmodified CXCR4 receptors, which can interact with SDF1, thereby preserving lymphocyte homing and functionality. The rationale of the method is to generate modified T-cells that are HIV resistant and that function to provide lymphoid immunity in the short term for a subject with severe manifestations of HIV. The modified T-cells can help a subject overcome severe opportunistic infections. Subjects who can benefit from this method include those suffering from severe HIV, refractory HIV, end-stage HIV (e.g., AIDS), treatment resistant HIV, opportunistic infections, and CXCR4-coreceptor predominant HIV. The modified cells can be infused in a single or multiple doses.

(5.2) Knocking Down CXCR4 Mediated by an Enzymatically Inactive Cas9 (eiCas9) Molecule

[0528] A targeted knockdown approach reduces or eliminates expression of functional CXCR4 gene product. As described herein, in certain embodiments, a targeted knockdown is mediated by targeting an enzymatically inactive Cas9 (eiCas9) molecule or an eiCas9 fused to a transcription repressor domain or chromatin modifying protein to alter transcription, e.g., to block, reduce, or decrease transcription, of the CXCR4 gene.

[0529] Methods and compositions discussed herein may be used to alter the expression of the CXCR4 gene to treat or prevent HIV infection or AIDS by targeting a promoter region of the CXCR4 gene. In certain embodiments, the promoter region is targeted to knock down expression of the CXCR4 gene. A targeted knockdown approach reduces or eliminates expression of functional CXCR4 gene product. As described herein, in certain embodiments, a targeted knockdown is mediated by targeting an enzymatically inactive Cas9 (eiCas9) or an eiCas9 fused to a transcription repressor domain or chromatin modifying protein to alter transcription, e.g., to block, reduce, or decrease transcription, of the CXCR4 gene.

[0530] In certain embodiments, one or more eiCas9s may be used to block binding of one or more endogenous transcription factors. In certain embodiments, an eiCas9 can be fused to a chromatin modifying protein. Altering chromatin status can result in decreased expression of the target gene. One or more eiCas9s fused to one or more chromatin modifying proteins may be used to alter chromatin status.

### (5.3) Introduction of One or More Mutations in the CXCR4 Gene

[0531] In certain embodiments, the method comprises introducing one or more mutations in the CXCR4 gene. In certain embodiments, the introduction is mediated by HDR. In certain embodiments, the one or more mutations comprise one or more single base substitutions, one or more two base substitutions, or combinations thereof. In certain embodiments, the one or more mutations disrupt HIV gp120 binding to CXCR4.

[0532] In certain embodiments, the method introduces a single base substitution or a two base substitution in the CXCR4 gene that disrupts HIV gp120 binding to CXCR4. In certain embodiments, themethod comprises introducing a single base substitution or a two base substitution using homology directed repair by CRISPR/Cas9. Creation of a point mutation or a two base pair substitution in the CXCR4 binding domain can alter binding kinetics between CXCR4 and HIV envelope protein gp120, decrease strength of binding, decrease efficiency of binding and/or decreasing frequency of binding between CXCR4 and HIV. Alteration of binding between CXCR4 and HIV gp120 leads to decreased viral entry into cells (Choi et al., J. Virol. 2005;79:15398-15404. Brelot et al., J. Biol. Chem. 2000;275:23736-23744. Brelot et al., J. Virol. 73:2576-2586(1999). Zhou et al., J. Biol. Chem. 2001;276:42826-42833.). The methods create a single base substitution or a two base substitution in the CXCR4 gene in key HIV gp120 binding domains and lead to decreased HIV infectivity, and decreased symptoms of disease. The method ameliorates or cures HIV infection. The method is particularly relevant in late-stage HIV, in which CXCR4 coreceptor binding tends to represent the majority of HIV coreceptor activity in a subject (Connor et al. J Exp Med. 1997 Feb. 17; 185(4):621-8).

[0533] In certain embodiments, the single base substitution or two base substitution in CXCR4 is introduced in regions known to be critical for HIV gp120 binding and interaction with CXCR4 receptor. There is considerable overlap between regions on CXCR4 that interact with HIV gp120 and regions on CXCR4 that interact with SDF1 (also known as CXCL12). Key regions on CXCR4 that are involved with binding to both HIV gp120 and SDF1 include, but are not limited to: amino acids 2-25 and amino acid Glu288. The regions targeted comprise regions of CXCR4 that uniquely interact with HIV gp120 and are not key binding motifs for SDF1, including amino acids Asp171, Asp193, Gln200, Tyr255, Glu268, Glu277. The goal is to interrupt binding between HIV and CXCR4 while preserving binding between SDF1 and CXCR4, preserving critical immune function in a subject. (Suggested alterations to CXCR4 region 2-25 are described elsewhere in the methods; these methods are to be used in the short term treatment of a subject with severe HIV and are to be used to modify lymphoid cells, myeloid cells, T cells, T memory stem cells (TSCMs) and/or HSPCs).

[0534] Specific amino acids in CXCR4 have been demonstrated to be regions involved in HIV gp120 binding, including amino acids 171D, 193D, 200Q, 255Y, 268E, 277E. These amino acids are targeted for substitution. (See Table 18 for CXCR4 amino acid residues, proposed change to residue and refererence.) Specific Aspartic acid and Glutamic acid residues on CXCR4 are involved creating salt bridges between CXCR4 and HIV gp120 (Tamamis et al., Biophys J. 2013 Sep. 17; 105(6): 1502-1514). These residues are targeted for alteration. Methods that alter binding of HIV gp120 to CXCR4 but do not disrupt CXCR4 mediated chemotaxis and binding to SDF-1, or HSC homing to, lodging, and retention in the bone marrow are to be used to modify HSCs or HSPCs, followed by genome editing HSC transplantation.

TABLE 18

| CXCR4 | Amino | Proposed | |
|---|---|---|---|
| Position, | Acid, | change | Reference for decreased binding of HIV |
| Amino | wild | to amino | gp120 to CXCR4 at specified amino |
| Acid | type | acid: | acid position |
| 171 | D | A | Choi et al., J. Virol. 2005; 79: |
| | | | 15398-15404. |
| 171 | D | N | Brelot et al., J. Biol. Chem. |
| | | | 2000; 275: 23736-23744. |
| | | | Brelot et al., J. Virol. 73: |
| | | | 2576-2586(1999). |
| | | | Choi et al., J. Virol. 2005; |
| | | | 79: 15398-15404. |
| 193 | D | S | Brelot et al., J. Virol. 73: |
| | | | 2576-2586(1999). |
| 193 | D | A | Brelot et al., J. Biol. Chem. |
| | | | 2000; 275: 23736-23744. Brelot et |
| | | | al., J. Virol. 73: 2576-2586(1999). |
| 200 | Q | N | Zhou et al., J. Biol. Chem. |
| | | | 2001; 276: 42826-42833. |
| 255 | Y | A | Tamamis et al., Biophys J. 2013 |
| | | | Sep 17; 105(6): 1502-1514. |
| | | | Choi et al., J. Virol. 2005; |
| | | | 79: 15398-15404. |
| 268 | E | N | Zhou et al., J. Biol. Chem. |
| | | | 2001; 276: 42826-42833. |
| 268 | E | A | Brelot et al., J. Biol. Chem. |
| | | | 2000; 275: 23736-23744. |
| | | | Choi et al., J. Virol. 2005; |
| | | | 79: 15398-15404. |
| 277 | E | A | Tamamis et al., Biophys J. 2013 |
| | | | Sep 17; 105(6): 1502-1514. |
| | | | Brelot et al., J. Biol. Chem. |
| | | | 2000; 275: 23736-23744. |

[0535] In certain embodiments, amino acid 171D on the CXCR4 protein is targeted for substitution. The amino acid is changed to 171A or 171N, with homology directed repair utilizing CRISPR/Cas9 to modify the amino acid based on the required cDNA sequence. Interaction of CXCR4 with HIV gp120 has been demonstrated to be reduced significantly by this amino acid substitution (Choi et al., J. Virol. 2005;79:15398-15404). The method reduces HIV binding to CXCR4, decreases viral entry and ameliorates disease. Methods that alter binding of HIV gp120 to CXCR4 but do not disrupt CXCR4 mediated chemotaxis and binding to SDF-1, or HSC homing to, lodging, and retention in the bone marrow are to be used to modify HSCs or HSPCs, followed by genome editing HSC transplantation.

[0536] In certain embodiments, amino acid 193D on the CXCR4 protein is targeted for substitution. The amino acid is changed to 193A or 193S with homology directed repair utilizing CRISPR/Cas9 to modify the amino acid based on the required cDNA sequence. Interaction of CXCR4 with HIV gp120 has been demonstrated to be reduced significantly by this amino acid substitution. (Brelot et al., J. Biol. Chem. 2000;275:23736-23744; Brelot et al., J. Virol. 73:2576-2586(1999)) The method reduces HIV binding to CXCR4, decreases viral entry and ameliorates disease.

[0537] In certain embodiments, amino acid 200Q on the CXCR4 protein is targeted for substitution. The amino acid is changed to 200N with homology directed repair utilizing CRISPR/Cas9 to modify the amino acid based on the required cDNA sequence. Interaction of CXCR4 with HIV gp120 has been demonstrated to be reduced significantly by this amino acid substitution (Zhou et al., J. Biol. Chem. 2001;276:42826-42833). The method reduces HIV binding to CXCR4, decreases viral entry and ameliorates disease. Methods that alter binding of HIV gp120 to CXCR4 but do not disrupt CXCR4 mediated chemotaxis and binding to SDF-1, or HSC homing to, lodging, and retention in the bone marrow are to be used to modify HSCs or HSPCs, followed by genome editing HSC transplantation.

[0538] In certain embodiments, amino acid 255Y on the CXCR4 protein is targeted for substitution. The amino acid is changed to 255A with homology directed repair utilizing CRISPR/Cas9 to modify the amino acid based on the required cDNA sequence. Interaction of CXCR4 with HIV gp120 has been demonstrated to be reduced significantly by this amino acid substitution (Tamamis et al., Biophys J. 2013 Sep. 17; 105(6): 1502-1514). The method reduces HIV binding to CXCR4, decreases viral entry and ameliorates disease. Methods that alter binding of HIV gp120 to CXCR4 but do not disrupt CXCR4 mediated chemotaxis and binding to SDF-1, or HSC homing to, lodging, and retention in the bone marrow are to be used to modify HSCs or HSPCs, followed by genome editing HSC transplantation.

[0539] In certain embodiments, amino acid 268E on the CXCR4 protein is targeted for substitution. The amino acid is changed to 268A or 268N with homology directed repair utilizing CRISPR/Cas9 to modify the amino acid based on the required cDNA sequence. Interaction of CXCR4 with HIV gp120 has been demonstrated to be reduced significantly by this amino acid substitution (Zhou et al., J. Biol. Chem. 2001;276:42826-42833; Brelot et al., J. Biol. Chem. 2000;275:23736-23744.). The method reduces HIV binding to CXCR4, decreases viral entry and ameliorates disease. Methods that alter binding of HIV gp120 to CXCR4 but do not disrupt CXCR4 mediated chemotaxis and binding to SDF-1, or HSC homing to, lodging, and retention in the bone marrow are to be used to modify HSCs or HSPCs, followed by genome editing HSC transplantation.

[0540] In certain embodiments, amino acid 277E on the CXCR4 protein is targeted for substitution. The amino acid is changed to 277A with homology directed repair utilizing CRISPR/Cas9 to modify the amino acid based on the required cDNA sequence. Interaction of CXCR4 with HIV gp120 has been demonstrated to be reduced significantly by this amino acid substitution (Tamamis et al., Biophys J. 2013 Sep. 17; 105(6): 1502-1514). The method reduces HIV binding to CXCR4, decreases viral entry and ameliorates disease. Methods that alter binding of HIV gp120 to CXCR4 but do not disrupt CXCR4 mediated chemotaxis and binding to SDF-1, or HSC homing to, lodging, and retention in the bone marrow are to be used to modify HSCs or HSPCs, followed by genome editing HSC transplantation.

[0541] In certain embodiments, the targeting domain of the gRNA molecule is configured to provide a cleavage event, e.g., a double strand break or a single strand break, sufficiently close to (e.g., either 5′ or 3′ to) the target position in the CXCR4 gene for introduction of the mutation in the CXCR4 gene e.g., at 171D, 193D, 200Q, 255Y, 268E, or 277E. In certain embodiments, the targeting domain is configured such that a cleavage event, e.g., a double strand or single strand break, is positioned within 1, 2, 3, 4, 5, 10, 15, 20, 25, 30, 35, 40, 45, 50, 60, 70, 80, 90, 100, 150, 200, 250, 300, 350, 400, 450 or 500 nucleotides of the target position in the CXCR4 gene. The break, e.g., a double strand or single strand break, can be positioned upstream or downstream of the target position in the CXCR4 gene.

[0542] In certain embodiments, a second, third and/or fourth gRNA molecule is configured to provide a cleavage event, e.g., a double strand break or a single strand break, sufficiently close to (e.g., either 5′ or 3′ to) the target position in the CXCR4 gene for introduction of the mutation in the CXCR4 gene e.g., at 171D, 193D, 200Q, 255Y, 268E, or 277E. In certain embodiments, the targeting domain is configured such that a cleavage event, e.g., a double strand or single strand break, is positioned within 1, 2, 3, 4, 5, 10, 15, 20, 25, 30, 35, 40, 45, 50, 60, 70, 80, 90, 100, 150, 200, 250, 300, 350, 400, 450 or 500 nucleotides of the target position in the CXCR4 gene. The break, e.g., a double strand or single strand break, can be positioned upstream or downstream of the target position in the CXCR4 gene.

[0543] In certain embodiments, a single strand break is accompanied by an additional single strand break, positioned by a second, third and/or fourth gRNA molecule, as discussed below. For example, The targeting domains bind configured such that a cleavage event, e.g., the two single strand breaks, are positioned within 1, 2, 3, 4, 5, 10, 15, 20, 25, 30, 35, 40, 45, 50, 60, 70, 80, 90, 100, 150, 200, 250, 300, 350, 400, 450 or 500 nucleotides of the target position in the CXCR4 gene for introduction of the mutation in the CXCR4 gene e.g., at 171D, 193D, 200Q, 255Y, 268E, or 277E. In certain embodiments, the first and second gRNA molecules are configured such, that when guiding a Cas9 nickase, a single strand break can be accompanied by an additional single strand break, positioned by a second gRNA, sufficiently close to one another to result in an alteration of the target position in the CXCR4 gene. In certain embodiments, the first and second gRNA molecules are configured such that a single strand break positioned by said second gRNA is within 1, 2, 3, 4, 5, 10, 15, 20, 25, 30, 35, 40, 45, 50, 60, 70, 80, 90, 100, 150, 200, 250, 300, 350, 400, 450 or 500 nucleotides of the break positioned by said first gRNA molecule, e.g., when the Cas9 is a nickase. In certain embodiments, the two gRNA molecules are configured to position cuts at the same position, or within a few nucleotides of one another, on different strands, e.g., essentially mimicking a double strand break.

[0544] In certain embodiments, a double strand break can be accompanied by an additional double strand break, positioned by a second, third and/or fourth gRNA molecule, as is discussed below. For example, the targeting domain of a first gRNA molecule is configured such that a double strand break is positioned upstream of the target position in the CXCR4 gene within 1, 2, 3, 4, 5, 10, 15, 20, 25, 30, 35, 40, 45, 50, 60, 70, 80, 90, 100, 150, 200, 250, 300, 350, 400, 450 or 500 nucleotides of the target position; and the targeting domain of a second gRNA molecule is configured such that a double strand break is positioned downstream the target position in the CXCR4 gene, within 1, 2, 3, 4, 5, 10, 15, 20, 25, 30, 35, 40, 45, 50, 60, 70, 80, 90, 100, 150, 200, 250, 300, 350, 400, 450 or 500 nucleotides of the target position.

[0545] In certain embodiments, a double strand break can be accompanied by two additional single strand breaks, positioned by a second gRNA molecule and a third gRNA molecule. For example, the targeting domain of a first gRNA molecule is configured such that a double strand break is positioned upstream of the target position in the CXCR4 gene, e.g., within 1, 2, 3, 4, 5, 10, 15, 20, 25, 30, 35, 40, 45, 50, 60, 70, 80, 90, 100, 150, 200, 250, 300, 350, 400, 450 or 500 nucleotides of the target position; and the targeting domains of a second and third gRNA molecule are configured such that two single strand breaks are positioned downstream of the target position in the CXCR4 gene, within 1, 2, 3, 4, 5, 10, 15, 20, 25, 30, 35, 40, 45, 50, 60, 70, 80, 90, 100, 150, 200, 250, 300, 350, 400, 450 or 500 nucleotides of the target position. In certain embodiments, the targeting domain of the first, second and third gRNA molecules are configured such that a cleavage event, e.g., a double strand or single strand break, is positioned, independently for each of the gRNA molecules.

[0546] In certain embodiments, a first and second single strand breaks can be accompanied by two additional single strand breaks positioned by a third gRNA molecule and a fourth gRNA molecule. For example, the targeting domain of a first and second gRNA molecule are configured such that two single strand breaks are positioned upstream of the target position in the CXCR4 gene, e.g., within 1, 2, 3, 4, 5, 10, 15, 20, 25, 30, 35, 40, 45, 50, 60, 70, 80, 90, 100, 150, 200, 250, 300, 350, 400, 450 or 500 nucleotides of the target position in the CXCR4 gene; and the targeting domains of a third and fourth gRNA molecule are configured such that two single strand breaks are positioned downstream of the target position in the CXCR4 gene, e.g., within 1, 2, 3, 4, 5, 10, 15, 20, 25, 30, 35, 40, 45, 50, 60, 70, 80, 90, 100, 150, 200, 250, 300, 350, 400, 450 or 500 nucleotides of the target position in the CXCR4 gene.

[0547] In certain embodiments, a mutation in the CXCR4 gene, e.g., at 171D, 193D, 200Q, 255Y, 268E, or 277E is introduced using an exogenously provided template nucleic acid, e.g., by HDR. In certain embodiments, the template nucleic acid is a single strand deoxyoligonucleotide (ssODN). In certain embodiments, the template nuclei acid comprises the mutation at the target position in the CXCR4 gene for introduction of the mutation in the CXCR4 gene e.g., at 171D, 193D, 200Q, 255Y, 268E, or 277E in the CXCR4 gene.

[0548] In certain embodiments, an eaCas9 molecule, e.g., an eaCas9 molecule described herein, is used. In an embodiment, the eaCas9 molecule comprises HNH-like domain cleavage activity but has no, or no significant, N-terminal RuvC-like domain cleavage activity. In certain embodiments, the eaCas9 molecule is an HNH-like domain nickase. In certain embodiments, the eaCas9 molecule comprises a mutation at D10 (e.g., D10A). In certain embodiments, the eaCas9 molecule comprises N-terminal RuvC-like domain cleavage activity but has no, or no significant, HNH-like domain cleavage activity. In certain embodiments, the eaCas9 molecule is an N-terminal RuvC-like domain nickase. In certain embodiments, the eaCas9 molecule comprises a mutation at H840 (e.g., H840A) or N863 (e.g., N863A).

### 6. Methods of Multiplexed Alteration of Both CCR5 and CXCR4

[0549] As disclosed herein, both the CCR5 gene and the CXCR4 gene can be altered by gene editing, e.g., using the CRISPR-Cas9 mediated methods, genome editing systems, and compositions described herein. The alteration of two or more genes (e.g., CCR5 and CRCX4 genes) is referred to herein as “multiplexing”. In certain embodiments, multiplexing comprisesalteration of at least two genes (e.g., a CCR5 gene and a CRCX4 gene).

[0550] Methods, genome editing systems, and compositions discussed herein provide for altering both a CCR5 target position in the CCR5 gene and a CXCR4 target position in the CXCR4 gene.

[0551] Any one of the approaches for altering CCR5 described in Section 4 can be combined with any one of the approaches for altering CXCR4 described in Section 5 for multiplexed alteration of CCR5 and CXCR4. For example, multiplexed alteration of CCR5 and CXCR4 can be achieved by one or more of the following approaches:

[0552] (i) knocking out the CCR5 gene and knocking out the CXCR4 gene;

[0553] (ii) knocking out the CCR5 gene and knocking down the CXCR4 gene;

[0554] (iii) knocking down the CCR5 gene and knocking out the CXCR4 gene;

[0555] (iv) knocking down the CCR5 gene and knocking down the CXCR4 gene;

[0556] (v) introducing one or more mutations in the CCR5 gene and knocking out the CXCR4 gene;

[0557] (vi) introducing one or more mutations in the CCR5 gene and knocking down the CXCR4 gene;

[0558] (vii) knocking out the CCR5 gene and introducing one or more mutations in the CXCR4 gene;

[0559] (viii) knocking down the CCR5 gene and introducing one or more mutations in the CXCR4 gene; and

[0560] (ix) introducing one or more mutations in the CCR5 gene and introducing one or more mutations in the CXCR4 gene.

[0561] Knocking out the CCR5 gene can be achieved by one or more of the approaches described in Section 4, e.g., insertion or deletion (e.g., NHEJ-mediated insertion or deletion) of one or more nucleotides in close proximity to or within the early coding region of the CCR5 gene (referred to as “(4.1a)” in Section 4), deletion (e.g., NHEJ-mediated deletion) of a genomic sequence including at least a portion of the CCR5 gene (referred to as “(4.1b)” in Section 4), knockout of CCR5 with concomitant knock-in of anti-HIV gene or genes under expression of endogenous promoter or Pol III promoter (referred to as “(4.1c)” in Section 4); and knockout of CCR5 with concomitant knock-in of drug resistance selectable marker for enabling selection of modified HSCs (referred to as “(4.1d)” in Section 4).

[0562] Knocking down the CCR5 gene can be achieved by the approach described in Section 4, e.g., mediated by enzymatically inactive Cas9 (eiCas9) molecule or an eiCas9-fusion protein (referred to as “(4.2)” in Section 4).

[0563] Introducing one or more mutations in the CCR5 gene can be achieved by one or more approaches described in Section 4, e.g., NHEJ-mediated creation of naturally occurring delta 32 mutation in CCR5 gene (referred to as “(4.3 a)” in Section 4); and HDR-mediated introduction of delta 32 mutation to CCR5 (referred to as “(4.3b)” in Section 4).

[0564] Knocking out the CXCR4 gene can be achieved by one or more of the approaches described in Section 5, e.g., insertion or deletion (e.g., NHEJ-mediated insertion or deletion) of one or more nucleotides in close proximity to or within the early coding region of the CXCR4 gene (referred to as “(5.1a)” in Section 5), deletion (e.g., NHEJ-mediated deletion) of a genomic sequence including at least a portion of the CXCR4 gene (referred to as “(5.1b)” in Section 5), and deletion (e.g., NHEJ-mediated deletion) of amino acids in N-terminus in the CXCR4 gene (referred to as “(5.1c)” in Section 5).

[0565] Knocking down the CXCR4 gene can be achieved by the approach described in Section 5, e.g., mediated by enzymatically inactive Cas9 (eiCas9) molecule or an eiCas9-fusion protein (referred to as “(5.2)” in Section 5).

[0566] Introducing one or more mutations in the CXCR4 gene can be achieved by ne or more of the approaches described in Section 5, e.g., HDR-mediated introduction of one or more mutations (e.g., single or double base subsitutions) in the CXCR4 gene (referred to as “(5.3)” in Section 5).

[0567] In certain embodiments, multiplexed alteration of CCR5 and CXCR4 can be achieved by one or more of the following approaches:

[0568] (a) insertion or deletion (e.g., NHEJ-mediated insertion or deletion) of one or more nucleotides in close proximity to or within the early coding region of the CCR5 gene (referred to as “(4.1a)” in Section 4), and insertion or deletion (e.g., NHEJ-mediated insertion or deletion) of one or more nucleotides in close proximity to or within the early coding region of the CXCR4 gene (referred to as “(5.1a)” in Section 5);

[0569] (b) deletion (e.g., NHEJ-mediated deletion) of a genomic sequence including at least a portion of the CCR5 gene (referred to as “(4.1b)” in Section 4), and insertion or deletion (e.g., NHEJ-mediated insertion or deletion) of one or more nucleotides in close proximity to or within the early coding region of the CXCR4 gene (referred to as “(5.1a)” in Section 5);

[0570] (c) knockout of CCR5 with concomitant knock-in of anti-HIV gene or genes under expression of endogenous promoter or Pol III promoter (referred to as “(4.1c)” in Section 4), and insertion or deletion (e.g., NHEJ-mediated insertion or deletion) of one or more nucleotides in close proximity to or within the early coding region of the CXCR4 gene (referred to as “(5.1a)” in Section 5);

[0571] (d) knockout of CCR5 with concomitant knock-in of drug resistance selectable marker for enabling selection of modified HSCs (referred to as “(4.1d)” in Section 4), and insertion or deletion (e.g., NHEJ-mediated insertion or deletion) of one or more nucleotides in close proximity to or within the early coding region of the CXCR4 gene (referred to as “(5.1a)” in Section 5);

[0572] (e) knockdown of CCR5 mediated by enzymatically inactive Cas9 (eiCas9) molecule or an eiCas9-fusion protein (referred to as “(4.2)” in Section 4), and insertion or deletion (e.g., NHEJ-mediated insertion or deletion) of one or more nucleotides in close proximity to or within the early coding region of the CXCR4 gene (referred to as “(5.1a)” in Section 5);

[0573] (f) NHEJ-mediated creation of naturally occurring delta 32 mutation in CCR5 gene (referred to as “(4.3 a)” in Section 4), and insertion or deletion (e.g., NHEJ-mediated insertion or deletion) of one or more nucleotides in close proximity to or within the early coding region of the CXCR4 gene (referred to as “(5.1a)” in Section 5);

[0574] (g) HDR-mediated introduction of delta 32 mutation to CCR5 (referred to as “(4.3b)” in Section 4), and insertion or deletion (e.g., NHEJ-mediated insertion or deletion) of one or more nucleotides in close proximity to or within the early coding region of the CXCR4 gene (referred to as “(5.1a)” in Section 5);

[0575] (h) insertion or deletion (e.g., NHEJ-mediated insertion or deletion) of one or more nucleotides in close proximity to or within the early coding region of the CCR5 gene (referred to as “(4.1a)” in Section 4), deletion (e.g., NHEJ-mediated deletion) of a genomic sequence including at least a portion of the CXCR4 gene (referred to as “(5.1b)” in Section 5);

[0576] (i) deletion (e.g., NHEJ-mediated deletion) of a genomic sequence including at least a portion of the CCR5 gene (referred to as “(4.1b)” in Section 4), deletion (e.g., NHEJ-mediated deletion) of a genomic sequence including at least a portion of the CXCR4 gene (referred to as “(5.1b)” in Section 5);

[0577] (j) knockout of CCR5 with concomitant knock-in of anti-HIV gene or genes under expression of endogenous promoter or Pol III promoter (referred to as “(4.1c)” in Section 4), and deletion (e.g., NHEJ-mediated deletion) of a genomic sequence including at least a portion of the CXCR4 gene (referred to as “(5.1b)” in Section 5);

[0578] (k) knockout of CCR5 with concomitant knock-in of drug resistance selectable marker for enabling selection of modified HSCs (referred to as “(4.1d)” in Section 4), and deletion (e.g., NHEJ-mediated deletion) of a genomic sequence including at least a portion of the CXCR4 gene (referred to as “(5.1b)” in Section 5);

[0579] (l) knockdown of CCR5 mediated by enzymatically inactive Cas9 (eiCas9) molecule or an eiCas9-fusion protein (referred to as “(4.2)” in Section 4), and deletion (e.g., NHEJ-mediated deletion) of a genomic sequence including at least a portion of the CXCR4 gene (referred to as “(5.1b)” in Section 5);

[0580] (m) NHEJ-mediated creation of naturally occurring delta 32 mutation in CCR5 gene (referred to as “(4.3 a)” in Section 4), and deletion (e.g., NHEJ-mediated deletion) of a genomic sequence including at least a portion of the CXCR4 gene (referred to as “(5.1b)” in Section 5);

[0581] (n) HDR-mediated introduction of delta 32 mutation to CCR5 (referred to as “(4.3b)” in Section 4), and deletion (e.g., NHEJ-mediated deletion) of a genomic sequence including at least a portion of the CXCR4 gene (referred to as “(5.1b)” in Section 5);

[0582] (o) insertion or deletion (e.g., NHEJ-mediated insertion or deletion) of one or more nucleotides in close proximity to or within the early coding region of the CCR5 gene (referred to as “(4.1a)” in Section 4), and deletion (e.g., NHEJ-mediated deletion) of amino acids in N-terminus in the CXCR4 gene (referred to as “(5.1c)” in Section 5);

[0583] (p) deletion (e.g., NHEJ-mediated deletion) of a genomic sequence including at least a portion of the CCR5 gene (referred to as “(4.1b)” in Section 4), and deletion (e.g., NHEJ-mediated deletion) of amino acids in N-terminus in the CXCR4 gene (referred to as “(5.1c)” in Section 5);

[0584] (q) knockout of CCR5 with concomitant knock-in of anti-HIV gene or genes under expression of endogenous promoter or Pol III promoter (referred to as “(4.1c)” in Section 4), and deletion (e.g., NHEJ-mediated deletion) of amino acids in N-terminus in the CXCR4 gene (referred to as “(5.1c)” in Section 5);

[0585] (r) knockout of CCR5 with concomitant knock-in of drug resistance selectable marker for enabling selection of modified HSCs (referred to as “(4.1d)” in Section 4), and deletion (e.g., NHEJ-mediated deletion) of amino acids in N-terminus in the CXCR4 gene (referred to as “(5.1c)” in Section 5);

[0586] (s) knockdown of CCR5 mediated by enzymatically inactive Cas9 (eiCas9) molecule or an eiCas9-fusion protein (referred to as “(4.2)” in Section 4), and deletion (e.g., NHEJ-mediated deletion) of amino acids in N-terminus in the CXCR4 gene (referred to as “(5.1c)” in Section 5);

[0587] (t) NHEJ-mediated creation of naturally occurring delta 32 mutation in CCR5 gene (referred to as “(4.3 a)” in Section 4), and deletion (e.g., NHEJ-mediated deletion) of amino acids in N-terminus in the CXCR4 gene (referred to as “(5.1c)” in Section 5);

[0588] (u) HDR-mediated introduction of delta 32 mutation to CCR5 (referred to as “(4.3b)” in Section 4), and deletion (e.g., NHEJ-mediated deletion) of amino acids in N-terminus in the CXCR4 gene (referred to as “(5.1c)” in Section 5);

[0589] (v) insertion or deletion (e.g., NHEJ-mediated insertion or deletion) of one or more nucleotides in close proximity to or within the early coding region of the CCR5 gene (referred to as “(4.1a)” in Section 4), and knockdown of the CXCR4 gene mediated by enzymatically inactive Cas9 (eiCas9) molecule or an eiCas9-fusion protein (referred to as “(5.2)” in Section 5);

[0590] (w) deletion (e.g., NHEJ-mediated deletion) of a genomic sequence including at least a portion of the CCR5 gene (referred to as “(4.1b)” in Section 4), and knockdown of the CXCR4 gene mediated by enzymatically inactive Cas9 (eiCas9) molecule or an eiCas9-fusion protein (referred to as “(5.2)” in Section 5);

[0591] (x) knockout of CCR5 with concomitant knock-in of anti-HIV gene or genes under expression of endogenous promoter or Pol III promoter (referred to as “(4.1c)” in Section 4), and knockdown of the CXCR4 gene mediated by enzymatically inactive Cas9 (eiCas9) molecule or an eiCas9-fusion protein (referred to as “(5.2)” in Section 5);

[0592] (y) knockout of CCR5 with concomitant knock-in of drug resistance selectable marker for enabling selection of modified HSCs (referred to as “(4.1d)” in Section 4), and knockdown of the CXCR4 gene mediated by enzymatically inactive Cas9 (eiCas9) molecule or an eiCas9-fusion protein (referred to as “(5.2)” in Section 5);

[0593] (z) knockdown of CCR5 mediated by enzymatically inactive Cas9 (eiCas9) molecule or an eiCas9-fusion protein (referred to as “(4.2)” in Section 4), and knockdown of the CXCR4 gene mediated by enzymatically inactive Cas9 (eiCas9) molecule or an eiCas9-fusion protein (referred to as “(5.2)” in Section 5);

[0594] (aa) NHEJ-mediated creation of naturally occurring delta 32 mutation in CCR5 gene (referred to as “(4.3 a)” in Section 4), and knockdown of the CXCR4 gene mediated by enzymatically inactive Cas9 (eiCas9) molecule or an eiCas9-fusion protein (referred to as “(5.2)” in Section 5);

[0595] (ab) HDR-mediated introduction of delta 32 mutation to CCR5 (referred to as “(4.3b)” in Section 4), and knockdown of the CXCR4 gene mediated by enzymatically inactive Cas9 (eiCas9) molecule or an eiCas9-fusion protein (referred to as “(5.2)” in Section 5);

[0596] (ac) insertion or deletion (e.g., NHEJ-mediated insertion or deletion) of one or more nucleotides in close proximity to or within the early coding region of the CCR5 gene (referred to as “(4.1a)” in Section 4), and HDR-mediated introduction of one or more mutations (e.g., single or double base subsitutions) in the CXCR4 gene (referred to as “(5.3)” in Section 5);

[0597] (ad) deletion (e.g., NHEJ-mediated deletion) of a genomic sequence including at least a portion of the CCR5 gene (referred to as “(4.1b)” in Section 4), and HDR-mediated introduction of one or more mutations (e.g., single or double base subsitutions) in the CXCR4 gene (referred to as “(5.3)” in Section 5);

[0598] (ae) knockout of CCR5 with concomitant knock-in of anti-HIV gene or genes under expression of endogenous promoter or Pol III promoter (referred to as “(4.1c)” in Section 4), and HDR-mediated introduction of one or more mutations (e.g., single or double base subsitutions) in the CXCR4 gene (referred to as “(5.3)” in Section 5);

[0599] (af) knockout of CCR5 with concomitant knock-in of drug resistance selectable marker for enabling selection of modified HSCs (referred to as “(4.1d)” in Section 4), and HDR-mediated introduction of one or more mutations (e.g., single or double base subsitutions) in the CXCR4 gene (referred to as “(5.3)” in Section 5);

[0600] (ag) knockdown of CCR5 mediated by enzymatically inactive Cas9 (eiCas9) molecule or an eiCas9-fusion protein (referred to as “(4.2)” in Section 4), and HDR-mediated introduction of one or more mutations (e.g., single or double base subsitutions) in the CXCR4 gene (referred to as “(5.3)” in Section 5);

[0601] (ah) NHEJ-mediated creation of naturally occurring delta 32 mutation in CCR5 gene (referred to as “(4.3 a)” in Section 4), and HDR-mediated introduction of one or more mutations (e.g., single or double base subsitutions) in the CXCR4 gene (referred to as “(5.3)” in Section 5); and

[0602] (ai) HDR-mediated introduction of delta 32 mutation to CCR5 (referred to as “(4.3b)” in Section 4), and HDR-mediated introduction of one or more mutations (e.g., single or double base subsitutions) in the CXCR4 gene (referred to as “(5.3)” in Section 5).

[0603] In certain embodiments, multiplexed alteration of CCR5 and CXCR4 can be achieved by knocking out a CCR gene and knocking out a CXCR4 gene.

[0604] In certain embodiments, alteration of the CCR5 gene and the CXCR4 gene, decreases or eliminates the expression of both T tropic and M tropic coreceptors for the HIV virus. In certain embodiments, the HIV virus is unable to infect CD4 cells, CD8 cells, T cells, B cells, neutrophils, eosinophils, GALT, dendritic cells, microglia cells, myeloid progenitor cells, and/or lymphoid progenitor cells. In certain embodiments, HIV is unable to spread within the host and/or the disease is treated.In certain embodiments, a single Cas9 molecule is configured, e.g., for the introduction of one or more breaks in a CCR5 target position and a CXCR4 target position; for introduction of one or more breaks in a CXCR4 target position and for the introduction of two sets of breaks in a CCR5 target position; for introduction of one or more breaks in a CXCR4 target position and for the introduction of two sets of breaks in a CCR5 target position; or an eiCas9 targeting the alteration of transcription, e.g., to block, reduce, or decrease transcription, of the CXCR4 and the CCR5 gene. In certain embodiments, two distinct Cas9 molecules are configured, e.g. a Cas9 nickase targeting a CCR5 target position and a Cas9 nickase targeting a CXCR4 target position; an eiCas9 to alter transcription (e.g., to block, reduce, or decrease transcription) of the CCR5 gene and a Cas9 nickase targeting a CXCR4 target position; an eiCas9 molecule to alter transcription (e.g., to block, reduce, or decrease transcription) of the CXCR4 gene and a Cas9 nickase targeting a CCR5 target position; or an eiCas9 targeting the alteration of transcription (e.g., to block, reduce, or decrease transcription) of the CXCR4 gene and an eiCas9 targeting the alteration of transcription (e.g., to block, reduce, or decrease transcription) of the CCR5 gene.

[0605] When two or more genes (e.g., CCR5 and CXCR4) are targeted for alteration, the two or more genes (e.g., CCR5 and CXCR4) can be altered sequentially or simultaneously. In certain embodiments, the the CCR5 gene and the CXCR4 gene are altered simultaneously. In certain embodiments, the the CCR5 gene and the CXCR4 gene are altered sequentially. In certain embodiments, the alteration of the CXCR4 gene is prior to the alteration of the CCR5 gene. In certain embodiments, the alteration of the CXCR4 gene is concurrent with the alteration of the CCR5 gene. In certain embodiments, the alteration of the CXCR4 gene is subsequent to the alteration of the CCR5 gene. In certain embodiments, the effect of the alterations is synergistic. In certain embodiments, the two or more genes (e.g., CCR5 and CXCR4) are altered sequentially in order to reduce the probability of introducing genomic rearrangements (e.g., translocations) involving the two target positions.

7. Guide RNA (gRNA) Molecules

[0606] A gRNA molecule, as that term is used herein, refers to a nucleic acid that promotes the specific targeting or homing of a gRNA molecule/Cas9 molecule complex to a target nucleic acid. gRNA molecules can be unimolecular (having a single RNA molecule) (e.g., chimeric), or modular (comprising more than one, and typically two, separate RNA molecules). The gRNA molecules provided herein comprise a targeting domain comprising, consisting of, or consisting essentially of a nucleic acid sequence fully or partially complementary to a target domain (also referred to as “target sequence”). In certain embodiments, the gRNA molecule further comprises one or more additional domains, including for example a first complementarity domain, a linking domain, a second complementarity domain, a proximal domain, a tail domain, and a 5′ extension domain. Each of these domains is discussed in detail below. In certain embodiments, one or more of the domains in the gRNA molecule comprises a nucleotide sequecne identical to or sharing sequence homology with a naturally occurring sequence, e.g., from S. pyogenes, S. aureus, or S. thermophilus. In certain embodiments, one or more of the domains in the gRNA molecule comprises a nucleotide sequecne identical to or sharing sequence homology with a naturally occurring sequence, e.g., from S. pyogenes or S. aureus,

[0607] Several exemplary gRNA structures are provided in FIGS. 1A-1I. With regard to the three-dimensional form, or intra- or inter-strand interactions of an active form of a gRNA, regions of high complementarity are sometimes shown as duplexes in FIGS. 1A-1I and other depictions provided herein. FIG. 7 illustrates gRNA domain nomenclature using the gRNA sequence of SEQ ID NO:42, which contains one hairpin loop in the tracrRNA-derived region. In certain embodiments, a gRNA may contain more than one (e.g., two, three, or more) hairpin loops in this region (see, e.g., FIGS. 1H-1I).

[0608] In certain embodiments, a unimolecular, or chimeric, gRNA comprises, preferably from 5′ to 3′:

[0609] a targeting domain complementary to a target domain in a CCR5 gene or a CXCR4 gene, e.g., a targeting domain comprising a nucleotide sequence selected from SEQ ID NOs: 208 to 3739 (e.g., SEQ ID NOs: 208 to 1569 and 1617 to 3663) or SEQ ID NOs: 3740 to 8407 (e.g., SEQ ID NOs: 3740 to 5208 and 5241 to 8355);

[0610] a first complementarity domain;

[0611] a linking domain;

[0612] a second complementarity domain (which is complementary to the first complementarity domain);

[0613] a proximal domain; and

[0614] optionally, a tail domain.

In certain embodiments, a modular gRNA comprises:

[0615] a first strand comprising, preferably from 5′ to 3′:

[0616] a targeting domain complementary to a target domain in a CCR5 gene or a CXCR4 gene, e.g., a targeting domain comprising a nucleotide sequence selected from SEQ ID NOs: 208 to 3739 (e.g., SEQ ID NOs: 208 to 1569 and 1617 to 3663) or SEQ ID NOs: 3740 to 8407 (e.g., SEQ ID NOs: 3740 to 5208 and 5241 to 8355); and

[0617] a first complementarity domain; and

[0618] a second strand, comprising, preferably from 5′ to 3′:

[0619] optionally, a 5′ extension domain;

[0620] a second complementarity domain;

[0621] a proximal domain; and

[0622] optionally, a tail domain.

[0623] 7.1 Targeting Domain

[0624] The targeting domain (sometimes referred to alternatively as the guide sequence) comprises, consists of, or consists essentially of a nucleic acid sequence that is complementary or partially complementary to a target nucleic acid sequence in a CCR5 gene or a CXCR4 gene. The nucleic acid sequence in a CCR5 gene or a CXCR4 gene to which all or a portion of the targeting domain is complementary or partially complementary is referred to herein as the target domain.

[0625] Methods for selecting targeting domains are known in the art (see, e.g., Fu 2014; Sternberg 2014). Examples of suitable targeting domains for use in the methods, compositions, and kits described herein comprise nucleotide sequences set forth in SEQ ID NOs: 208 to 8407.

[0626] The strand of the target nucleic acid comprising the target domain is referred to herein as the complementary strand because it is complementary to the targeting domain sequence. Since the targeting domain is part of a gRNA molecule, it comprises the base uracil (U) rather than thymine (T); conversely, any DNA molecule encoding the gRNA molecule can comprise thymine rather than uracil. In a targeting domain/target domain pair, the uracil bases in the targeting domain will pair with the adenine bases in the target domain. In certain embodiments, the degree of complementarity between the targeting domain and target domain is sufficient to allow targeting of a Cas9 molecule to the target nucleic acid.

[0627] In certain embodiments, the targeting domain comprises a core domain and an optional secondary domain. In certain of these embodiments, the core domain is located 3′ to the secondary domain, and in certain of these embodiments the core domain is located at or near the 3′ end of the targeting domain. In certain of these embodiments, the core domain consists of or consists essentially of about 8 to about 13 nucleotides at the 3′ end of the targeting domain. In certain embodiments, only the core domain is complementary or partially complementary to the corresponding portion of the target domain, and in certain of these embodiments the core domain is fully complementary to the corresponding portion of the target domain. In certain embodiments, the secondary domain is also complementary or partially complementary to a portion of the target domain. In certain embodiments, the core domain is complementary or partially complementary to a core domain target in the target domain, while the secondary domain is complementary or partially complementary to a secondary domain target in the target domain. In certain embodiments, the core domain and secondary domain have the same degree of complementarity with their respective corresponding portions of the target domain. In certain embodiments, the degree of complementarity between the core domain and its target and the degree of complementarity between the secondary domain and its target may differ. In certain of these embodiments, the core domain may have a higher degree of complementarity for its target than the secondary domain, whereas in other embodiments the secondary domain may have a higher degree of complementarity than the core domain.

[0628] In certain embodiments, the targeting domain and/or the core domain within the targeting domain is 3 to 100, 5 to 100, 10 to 100, or 20 to 100 nucleotides in length, and in certain of these embodiments the targeting domain or core domain is 3 to 15, 3 to 20, 5 to 20, 10 to 20, 15 to 20, 5 to 50, 10 to 50, or 20 to 50 nucleotides in length. In certain embodiments, the targeting domain and/or the core domain within the targeting domain is 6, 7, 8, 9, 10, 11, 12, 13, 14, 15, 16, 17, 18, 19, 20, 21, 22, 23, 24, 25, or 26 nucleotides in length. In certain embodiments, the targeting domain and/or the core domain within the targeting domain is 6+/−2, 7+/−2, 8+/−2, 9+/−2, 10+/−2, 10+/−4, 10+/−5, 11+/−2, 12+/−2, 13+/−2, 14+/−2, 15+/−2, or 16+−2, 20+/−5, 30+/−5, 40+/−5, 50+/−5, 60+/−5, 70+/−5, 80+/−5, 90+/−5, or 100+/−5 nucleotides in length.

[0629] In certain embodiments wherein the targeting domain includes a core domain, the core domain is 3 to 20 nucleotides in length, and in certain of these embodiments the core domain 5 to 15 or 8 to 13 nucleotides in length. In certain embodiments wherein the targeting domain includes a secondary domain, the secondary domain is 0, 1, 2, 3, 4, 5, 6, 7, 8, 9, 10, 11, 12, 13, 14 or 15 nucleotides in length. In certain embodiments wherein the targeting domain comprises a core domain that is 8 to 13 nucleotides in length, the targeting domain is 26, 25, 24, 23, 22, 21, 20, 19, 18, 17, or 16 nucleotides in length, and the secondary domain is 13 to 18, 12 to 17, 11 to 16, 10 to 15, 9 to 14, 8 to 13, 7 to 12, 6 to 11, 5 to 10, 4 to 9, or 3 to 8 nucleotides in length, respectively.

[0630] In certain embodiments, the targeting domain is fully complementary to the target domain. Likewise, where the targeting domain comprises a core domain and/or a secondary domain, in certain embodiments one or both of the core domain and the secondary domain are fully complementary to the corresponding portions of the target domain. In certain embodiments, the targeting domain is partially complementary to the target domain, and in certain of these embodiments where the targeting domain comprises a core domain and/or a secondary domain, one or both of the core domain and the secondary domain are partially complementary to the corresponding portions of the target domain. In certain of these embodiments, the nucleic acid sequence of the targeting domain, or the core domain or targeting domain within the targeting domain, is at least about 80%, about 85%, about 90%, or about 95% complementary to the target domain or to the corresponding portion of the target domain. In certain embodiments, the targeting domain and/or the core or secondary domains within the targeting domain include one or more nucleotides that are not complementary with the target domain or a portion thereof, and in certain of these embodiments the targeting domain and/or the core or secondary domains within the targeting domain include 1, 2, 3, 4, 5, 6, 7, or 8 nucleotides that are not complementary with the target domain. In certain embodiments, the core domain includes 1, 2, 3, 4, or 5 nucleotides that are not complementary with the corresponding portion of the target domain. In certain embodiments wherein the targeting domain includes one or more nucleotides that are not complementary with the target domain, one or more of said non-complementary nucleotides are located within five nucleotides of the 5′ or 3′ end of the targeting domain. In certain of these embodiments, the targeting domain includes 1, 2, 3, 4, or 5 nucleotides within five nucleotides of its 5′ end, 3′ end, or both its 5′ and 3′ ends that are not complementary to the target domain. In certain embodiments wherein the targeting domain includes two or more nucleotides that are not complementary to the target domain, two or more of said non-complementary nucleotides are adjacent to one another, and in certain of these embodiments the two or more consecutive non-complementary nucleotides are located within five nucleotides of the 5′ or 3′ end of the targeting domain. In certain embodiments, the two or more consecutive non-complementary nucleotides are both located more than five nucleotides from the 5′ and 3′ ends of the targeting domain.

[0631] In certain embodiments, the targeting domain, core domain, and/or secondary domain do not comprise any modifications. In certain embodiments, the targeting domain, core domain, and/or secondary domain, or one or more nucleotides therein, have a modification, including but not limited to the modifications set forth below. In certain embodiments, one or more nucleotides of the targeting domain, core domain, and/or secondary domain may comprise a 2′ modification (e.g., a modification at the 2′ position on ribose), e.g., a 2-acetylation, e.g., a 2′ methylation. In certain embodiments, the backbone of the targeting domain can be modified with a phosphorothioate. In certain embodiments, modifications to one or more nucleotides of the targeting domain, core domain, and/or secondary domain render the targeting domain and/or the gRNA comprising the targeting domain less susceptible to degradation or more bio-compatible, e.g., less immunogenic. In certain embodiments, the targeting domain and/or the core or secondary domains include 1, 2, 3, 4, 5, 6, 7, or 8 or more modifications, and in certain of these embodiments the targeting domain and/or core or secondary domains include 1, 2, 3, or 4 modifications within five nucleotides of their respective 5′ ends and/or 1, 2, 3, or 4 modifications within five nucleotides of their respective 3′ ends. In certain embodiments, the targeting domain and/or the core or secondary domains comprise modifications at two or more consecutive nucleotides.

[0632] In certain embodiments wherein the targeting domain includes core and secondary domains, the core and secondary domains contain the same number of modifications. In certain of these embodiments, both domains are free of modifications. In other embodiments, the core domain includes more modifications than the secondary domain, or vice versa.

[0633] In certain embodiments, modifications to one or more nucleotides in the targeting domain, including in the core or secondary domains, are selected to not interfere with targeting efficacy, which can be evaluated by testing a candidate modification using a system as set forth below. gRNAs having a candidate targeting domain having a selected length, sequence, degree of complementarity, or degree of modification can be evaluated using a system as set forth below. The candidate targeting domain can be placed, either alone or with one or more other candidate changes in a gRNA molecule/Cas9 molecule system known to be functional with a selected target, and evaluated.

[0634] In certain embodiments, all of the modified nucleotides are complementary to and capable of hybridizing to corresponding nucleotides present in the target domain. In certain embodiments, 1, 2, 3, 4, 5, 6, 7 or 8 or more modified nucleotides are not complementary to or capable of hybridizing to corresponding nucleotides present in the target domain.

[0635] 7.2 First and Second Complementarity Domains

[0636] The first and second complementarity (sometimes referred to alternatively as the crRNA-derived hairpin sequence and tracrRNA-derived hairpin sequences, respectively) domains are fully or partially complementary to one another. In certain embodiments, the degree of complementarity is sufficient for the two domains to form a duplexed region under at least some physiological conditions. In certain embodiments, the degree of complementarity between the first and second complementarity domains, together with other properties of the gRNA, is sufficient to allow targeting of a Cas9 molecule to a target nucleic acid. Examples of first and second complementary domains are set forth in FIGS. 1A-1G.

[0637] In certain embodiments (see, e.g., FIGS. 1A-1B) the first and/or second complementarity domain includes one or more nucleotides that lack complementarity with the corresponding complementarity domain. In certain embodiments, the first and/or second complementarity domain includes 1, 2, 3, 4, 5, or 6 nucleotides that do not complement with the corresponding complementarity domain. For example, the second complementarity domain may contain 1, 2, 3, 4, 5, or 6 nucleotides that do not pair with corresponding nucleotides in the first complementarity domain. In certain embodiments, the nucleotides on the first or second complementarity domain that do not complement with the corresponding complementarity domain loop out from the duplex formed between the first and second complementarity domains. In certain of these embodiments, the unpaired loop-out is located on the second complementarity domain, and in certain of these embodiments the unpaired region begins 1, 2, 3, 4, 5, or 6 nucleotides from the 5′ end of the second complementarity domain.

[0638] In certain embodiments, the first complementarity domain is 5 to 30, 5 to 25, 7 to 25, 5 to 24, 5 to 23, 7 to 22, 5 to 22, 5 to 21, 5 to 20, 7 to 18, 7 to 15, 9 to 16, or 10 to 14 nucleotides in length, and in certain of these embodiments the first complementarity domain is 5, 6, 7, 8, 9, 10, 11, 12, 13, 14, 15, 16, 17, 18, 19, 20, 21, 22, 23, 24, or 25 nucleotides in length. In certain embodiments, the second complementarity domain is 5 to 27, 7 to 27, 7 to 25, 5 to 24, 5 to 23, 5 to 22, 5 to 21, 7 to 20, 5 to 20, 7 to 18, 7 to 17, 9 to 16, or 10 to 14 nucleotides in length, and in certain of these embodiments the second complementarity domain is 5, 6, 7, 8, 9, 10, 11, 12, 13, 14, 15, 16, 17, 18, 19, 20, 21, 22, 23, 24, 25, or 26 nucleotides in length. In certain embodiments, the first and second complementarity domains are each independently 6+/−2, 7+/−2, 8+/−2, 9+/−2, 10+/−2, 11+/−2, 12+/−2, 13+/−2, 14+/−2, 15+/−2, 16+/−2, 17+/−2, 18+/−2, 19+/−2, or 20+/−2, 21+/−2, 22+/−2, 23+/−2, or 24+/−2 nucleotides in length. In certain embodiments, the second complementarity domain is longer than the first complementarity domain, e.g., 2, 3, 4, 5, or 6 nucleotides longer.

[0639] In certain embodiments, the first and/or second complementarity domains each independently comprise three subdomains, which, in the 5′ to 3′ direction are: a 5′ subdomain, a central subdomain, and a 3′ subdomain. In certain embodiments, the 5′ subdomain and 3′ subdomain of the first complementarity domain are fully or partially complementary to the 3′ subdomain and 5′ subdomain, respectively, of the second complementarity domain. In certain embodiments, the 5′ subdomain of the first complementarity domain is 4 to 9 nucleotides in length, and in certain of these embodiments the 5′ domain is 4, 5, 6, 7, 8, or 9 nucleotides in length. In certain embodiments, the 5′ subdomain of the second complementarity domain is 3 to 25, 4 to 22, 4 to 18, or 4 to 10 nucleotides in length, and in certain of these embodiments the 5′ domain is 3, 4, 5, 6, 7, 8, 9, 10, 11, 12, 13, 14, 15, 16, 17, 18, 19, 20, 21, 22, 23, 24, or 25 nucleotides in length. In certain embodiments, the central subdomain of the first complementarity domain is 1, 2, or 3 nucleotides in length. In certain embodiments, the central subdomain of the second complementarity domain is 1, 2, 3, 4, or 5 nucleotides in length. In certain embodiments, the 3′ subdomain of the first complementarity domain is 3 to 25, 4 to 22, 4 to 18, or 4 to 10 nucleotides in length, and in certain of these embodiments the 3′ subdomain is 3, 4, 5, 6, 7, 8, 9, 10, 11, 12, 13, 14, 15, 16, 17, 18, 19, 20, 21, 22, 23, 24, or 25 nucleotides in length. In certain embodiments, the 3′ subdomain of the second complementarity domain is 4 to 9, e.g., 4, 5, 6, 7, 8 or 9 nucleotides in length.

[0640] The first and/or second complementarity domains can share homology with, or be derived from, naturally occurring or reference first and/or second complementarity domain. In certain of these embodiments, the first and/or second complementarity domains have at least about 50%, about 60%, about 70%, about 80%, about 85%, about 90%, or about 95% homology with, or differ by no more than 1, 2, 3, 4, 5, or 6 nucleotides from, the naturally occurring or reference first and/or second complementarity domain. In certain of these embodiments, the first and/or second complementarity domains may have at least about 50%, about 60%, about 70%, about 80%, about 85%, about 90%, or about 95% homology with homology with a first and/or second complementarity domain from S. pyogenes or S. aureus.

[0641] In certain embodiments, the first and/or second complementarity domains do not comprise any modifications. In other embodiments, the first and/or second complementarity domains or one or more nucleotides therein have a modification, including but not limited to a modification set forth below. In certain embodiments, one or more nucleotides of the first and/or second complementarity domain may comprise a 2′ modification (e.g., a modification at the 2′ position on ribose), e.g., a 2-acetylation, e.g., a 2′ methylation. In certain embodiments, the backbone of the targeting domain can be modified with a phosphorothioate. In certain embodiments, modifications to one or more nucleotides of the first and/or second complementarity domain render the first and/or second complementarity domain and/or the gRNA comprising the first and/or second complementarity less susceptible to degradation or more bio-compatible, e.g., less immunogenic. In certain embodiments, the first and/or second complementarity domains each independently include 1, 2, 3, 4, 5, 6, 7, or 8 or more modifications, and in certain of these embodiments the first and/or second complementarity domains each independently include 1, 2, 3, or 4 modifications within five nucleotides of their respective 5′ ends, 3′ ends, or both their 5′ and 3′ ends. In certain embodiments, the first and/or second complementarity domains each independently contain no modifications within five nucleotides of their respective 5′ ends, 3′ ends, or both their 5′ and 3′ ends. In certain embodiments, one or both of the first and second complementarity domains comprise modifications at two or more consecutive nucleotides.

[0642] In certain embodiments, modifications to one or more nucleotides in the first and/or second complementarity domains are selected to not interfere with targeting efficacy, which can be evaluated by testing a candidate modification in a system as set forth below. gRNAs having a candidate first or second complementarity domain having a selected length, sequence, degree of complementarity, or degree of modification can be evaluated in a system as set forth below. The candidate complementarity domain can be placed, either alone or with one or more other candidate changes in a gRNA molecule/Cas9 molecule system known to be functional with a selected target, and evaluated.

[0643] In certain embodiments, the duplexed region formed by the first and second complementarity domains is, for example, 6, 7, 8, 9, 10, 11, 12, 13, 14, 15, 16, 17, 18, 19, 20, 21, or 22 bp in length, excluding any looped out or unpaired nucleotides.

[0644] In certain embodiments, the first and second complementarity domains, when duplexed, comprise 11 paired nucleotides (see, for e.g., gRNA of SEQ ID NO:48). In certain embodiments, the first and second complementarity domains, when duplexed, comprise 15 paired nucleotides (see, e.g., gRNA of SEQ ID NO:50). In certain embodiments, the first and second complementarity domains, when duplexed, comprise 16 paired nucleotides (see, e.g., gRNA of SEQ ID NO:51). In certain embodiments, the first and second complementarity domains, when duplexed, comprise 21 paired nucleotides (see, e.g., gRNA of SEQ ID NO:29).

[0645] In certain embodiments, one or more nucleotides are exchanged between the first and second complementarity domains to remove poly-U tracts. For example, nucleotides 23 and 48 or nucleotides 26 and 45 of the gRNA of SEQ ID NO:48 may be exchanged to generate the gRNA of SEQ ID NOs:49 or 31, respectively. Similarly, nucleotides 23 and 39 of the gRNA of SEQ ID NO:29 may be exchanged with nucleotides 50 and 68 to generate the gRNA of SEQ ID NO:30.

[0646] 7.3 Linking Domain

[0647] The linking domain is disposed between and serves to link the first and second complementarity domains in a unimolecular or chimeric gRNA. FIGS. 1B-1E provide examples of linking domains. In certain embodiments, part of the linking domain is from a crRNA-derived region, and another part is from a tracrRNA-derived region.

[0648] In certain embodiments, the linking domain links the first and second complementarity domains covalently. In certain of these embodiments, the linking domain consists of or comprises a covalent bond. In other embodiments, the linking domain links the first and second complementarity domains non-covalently. In certain embodiments, the linking domain is ten or fewer nucleotides in length, e.g., 1, 2, 3, 4, 5, 6, 7, 8, 9, or 10 nucleotides. In other embodiments, the linking domain is greater than 10 nucleotides in length, e.g., 11, 12, 13, 14, 15, 16, 17, 18, 19, 20, 21, 22, 23, 24, or 25 or more nucleotides. In certain embodiments, the linking domain is 2 to 50, 2 to 40, 2 to 30, 2 to 20, 2 to 10, 2 to 5, 10 to 100, 10 to 90, 10 to 80, 10 to 70, 10 to 60, 10 to 50, 10 to 40, 10 to 30, 10 to 20, 10 to 15, 20 to 100, 20 to 90, 20 to 80, 20 to 70, 20 to 60, 20 to 50, 20 to 40, 20 to 30, or 20 to 25 nucleotides in length. In certain embodiments, the linking domain is 10+/−5, 20+/−5, 20+/−10, 30+/−5, 30+/−10, 40+/−5, 40+/−10, 50+/−5, 50+/−10, 60+/−5, 60+/−, 70+/−70+/−10, 80+/−5, 80+/−10, 90+/−5, 90+/−10, 100+/−5, or 100+/−10 nucleotides in length.

[0649] In certain embodiments, the linking domain shares homology with, or is derived from, a naturally occurring sequence, e.g., the sequence of a tracrRNA that is 5′ to the second complementarity domain. In certain embodiments, the linking domain has at least about 50%, about 60%, about 70%, about 80%, about 90%, or about 95% homology with or differs by no more than 1, 2, 3, 4, 5, or 6 nucleotides from a linking domain disclosed herein, e.g., the linking domains of FIGS. 1B-1E.

[0650] In certain embodiments, the linking domain does not comprise any modifications. In other embodiments, the linking domain or one or more nucleotides therein have a modification, including but not limited to the modifications set forth below. In certain embodiments, one or more nucleotides of the linking domain may comprise a 2′ modification (e.g., a modification at the 2′ position on ribose), e.g., a 2-acetylation, e.g., a 2′ methylation. In certain embodiments, the backbone of the linking domain can be modified with a phosphorothioate. In certain embodiments, modifications to one or more nucleotides of the linking domain render the linking domain and/or the gRNA comprising the linking domain less susceptible to degradation or more bio-compatible, e.g., less immunogenic. In certain embodiments, the linking domain includes 1, 2, 3, 4, 5, 6, 7, or 8 or more modifications, and in certain of these embodiments the linking domain includes 1, 2, 3, or 4 modifications within five nucleotides of its 5′ and/or 3′ end. In certain embodiments, the linking domain comprises modifications at two or more consecutive nucleotides.

[0651] In certain embodiments, modifications to one or more nucleotides in the linking domain are selected to not interfere with targeting efficacy, which can be evaluated by testing a candidate modification in a system as set forth below. gRNAs having a candidate linking domain having a selected length, sequence, degree of complementarity, or degree of modification can be evaluated in a system as set forth below. The candidate linking domain can be placed, either alone or with one or more other candidate changes in a gRNA molecule/Cas9 molecule system known to be functional with a selected target, and evaluated.

[0652] In certain embodiments, the linking domain comprises a duplexed region, typically adjacent to or within 1, 2, or 3 nucleotides of the 3′ end of the first complementarity domain and/or the 5′ end of the second complementarity domain. In certain of these embodiments, the duplexed region of the linking region is 10+/−5, 15+/−5, 20+/−5, 20+/−10, or 30+/−5 bp in length. In certain embodiments, the duplexed region of the linking domain is 1, 2, 3, 4, 5, 6, 7, 8, 9, 10, 11, 12, 13, 14, or 15 bp in length. In certain embodiments, the sequences forming the duplexed region of the linking domain are fully complementarity. In other embodiments, one or both of the sequences forming the duplexed region contain one or more nucleotides (e.g., 1, 2, 3, 4, 5, 6, 7, or 8 nucleotides) that are not complementary with the other duplex sequence.

[0653] 7.4 5′ Extension Domain

[0654] In certain embodiments, a modular gRNA as disclosed herein comprises a 5′ extension domain, i.e., one or more additional nucleotides 5′ to the second complementarity domain (see, e.g., FIG. 1A). In certain embodiments, the 5′ extension domain is 2 to 10 or more, 2 to 9, 2 to 8, 2 to 7, 2 to 6, 2 to 5, or 2 to 4 nucleotides in length, and in certain of these embodiments the 5′ extension domain is 2, 3, 4, 5, 6, 7, 8, 9, or 10 or more nucleotides in length.

[0655] In certain embodiments, the 5′ extension domain nucleotides do not comprise modifications, e.g., modifications of the type provided below. However, in certain embodiments, the 5′ extension domain comprises one or more modifications, e.g., modifications that it render it less susceptible to degradation or more bio-compatible, e.g., less immunogenic. By way of example, the backbone of the 5′ extension domain can be modified with a phosphorothioate, or other modification(s) as set forth below. In certain embodiments, a nucleotide of the 5′ extension domain can comprise a 2′ modification (e.g., a modification at the 2′ position on ribose), e.g., a 2-acetylation, e.g., a 2′ methylation, or other modification(s) as set forth below.

[0656] In certain embodiments, the 5′ extension domain can comprise as many as 1, 2, 3, 4, 5, 6, 7, or 8 modifications. In certain embodiments, the 5′ extension domain comprises as many as 1, 2, 3, or 4 modifications within 5 nucleotides of its 5′ end, e.g., in a modular gRNA molecule. In certain embodiments, the 5′ extension domain comprises as many as 1, 2, 3, or 4 modifications within 5 nucleotides of its 3′ end, e.g., in a modular gRNA molecule.

[0657] In certain embodiments, the 5′ extension domain comprises modifications at two consecutive nucleotides, e.g., two consecutive nucleotides that are within 5 nucleotides of the 5′ end of the 5′ extension domain, within 5 nucleotides of the 3′ end of the 5′ extension domain, or more than 5 nucleotides away from one or both ends of the 5′ extension domain. In certain embodiments, no two consecutive nucleotides are modified within 5 nucleotides of the 5′ end of the 5′ extension domain, within 5 nucleotides of the 3′ end of the 5′ extension domain, or within a region that is more than 5 nucleotides away from one or both ends of the 5′ extension domain. In certain embodiments, no nucleotide is modified within 5 nucleotides of the 5′ end of the 5′ extension domain, within 5 nucleotides of the 3′ end of the 5′ extension domain, or within a region that is more than 5 nucleotides away from one or both ends of the 5′ extension domain.

[0658] Modifications in the 5′ extension domain can be selected so as to not interfere with gRNA molecule efficacy, which can be evaluated by testing a candidate modification in a system as set forth below. gRNAs having a candidate 5′ extension domain having a selected length, sequence, degree of complementarity, or degree of modification, can be evaluated in a system as set forth below. The candidate 5′ extension domain can be placed, either alone, or with one or more other candidate changes in a gRNA molecule/Cas9 molecule system known to be functional with a selected target and evaluated.

[0659] In certain embodiments, the 5′ extension domain has at least about 60%, about 70%, about 80%, about 85%, about 90%, or about 95% homology with, or differs by no more than 1, 2, 3, 4, 5, or 6 nucleotides from, a reference 5′ extension domain, e.g., a naturally occurring, e.g., an S. pyogenes, S. aureus, or S. thermophilus, 5′ extension domain, or a 5′ extension domain described herein, e.g., from FIGS. 1A-1G.

[0660] 7.5 Proximal Domain

[0661] FIGS. 1A-1G provide examples of proximal domains.

[0662] In certain embodiments, the proximal domain is 5 to 20 or more nucleotides in length, e.g., 5, 6, 7, 8, 9, 10, 11, 12, 13, 14, 15, 16, 17, 18, 19, 20, 21, 22, 23, 24, 25, or 26 nucleotides in length. In certain of these embodiments, the proximal domain is 6+/−2, 7+/−2, 8+/−2, 9+/−2, 10+/−2, 11+/−2, 12+/−2, 13+/−2, 14+/−2, 14+/−2, 16+/−2, 17+/−2, 18+/−2, 19+/−2, or 20+/−2 nucleotides in length. In certain embodiments, the proximal domain is 5 to 20, 7, to 18, 9 to 16, or 10 to 14 nucleotides in length.

[0663] In certain embodiments, the proximal domain can share homology with or be derived from a naturally occurring proximal domain. In certain of these embodiments, the proximal domain has at least about 50%, about 60%, about 70%, about 80%, about 85%, about 90%, or about 95% homology with or differs by no more than 1, 2, 3, 4, 5, or 6 nucleotides from a proximal domain disclosed herein, e.g., an S. pyogenes, S. aureus, or S. thermophilus proximal domain, including those set forth in FIGS. 1A-1G.

[0664] In certain embodiments, the proximal domain does not comprise any modifications. In other embodiments, the proximal domain or one or more nucleotides therein have a modification, including but not limited to the modifications set forth in herein. In certain embodiments, one or more nucleotides of the proximal domain may comprise a 2′ modification (e.g., a modification at the 2′ position on ribose), e.g., a 2-acetylation, e.g., a 2′ methylation. In certain embodiments, the backbone of the proximal domain can be modified with a phosphorothioate. In certain embodiments, modifications to one or more nucleotides of the proximal domain render the proximal domain and/or the gRNA comprising the proximal domain less susceptible to degradation or more bio-compatible, e.g., less immunogenic. In certain embodiments, the proximal domain includes 1, 2, 3, 4, 5, 6, 7, or 8 or more modifications, and in certain of these embodiments the proximal domain includes 1, 2, 3, or 4 modifications within five nucleotides of its 5′ and/or 3′ end. In certain embodiments, the proximal domain comprises modifications at two or more consecutive nucleotides.

[0665] In certain embodiments, modifications to one or more nucleotides in the proximal domain are selected to not interfere with targeting efficacy, which can be evaluated by testing a candidate modification in a system as set forth below. gRNAs having a candidate proximal domain having a selected length, sequence, degree of complementarity, or degree of modification can be evaluated in a system as set forth below. The candidate proximal domain can be placed, either alone or with one or more other candidate changes in a gRNA molecule/Cas9 molecule system known to be functional with a selected target, and evaluated.

[0666] 7.6 Tail Domain

[0667] A broad spectrum of tail domains are suitable for use in the gRNA molecules disclosed herein. FIGS. 1A and 1C-1G provide examples of such tail domains.

[0668] In certain embodiments, the tail domain is absent. In other embodiments, the tail domain is 1 to 100 or more nucleotides in length, e.g., 1, 2, 3, 4, 5, 6, 7, 8, 9, 10, 20, 30, 40, 50, 60, 70, 80, 90, or 100 nucleotides in length. In certain embodiments, the tail domain is 1 to 5, 1 to 10, 1 to 15, 1 to 20, 1 to 50, 10 to 100, 20 to 100, 10 to 90, 20 to 90, 10 to 80, 20 to 80, 10 to 70, 20 to 70, 10 to 60, 20 to 60, 10 to 50, 20 to 50, 10 to 40, 20 to 40, 10 to 30, 20 to 30, 20 to 25, 10 to 20, or 10 to 15 nucleotides in length. In certain embodiments, the tail domain is 5+/−5, 10+/−5, 20+/−10, 20+/−5, 25+/−10, 30+/−10, 30+/−5, 40+/−10, 40+/−5, 50+/−10, 50+/−5, 60+/−10, 60+/−5, 70+/−10, 70+/−5, 80+/−10, 80+/−5, 90+/−10, 90+/−5, 100+/−10, or 100+/−5 nucleotides in length,

[0669] In certain embodiments, the tail domain can share homology with or be derived from a naturally occurring tail domain or the 5′ end of a naturally occurring tail domain. In certain of these embodiments, the proximal domain has at least about 50%, about 60%, about 70%, about 80%, about 85%, about 90%, or about 95% homology with or differs by no more than 1, 2, 3, 4, 5, or 6 nucleotides from a naturally occurring tail domain disclosed herein, e.g., an S. pyogenes, S. aureus, or S. thermophilus tail domain, including those set forth in FIGS. 1A and 1C-1G.

[0670] In certain embodiments, the tail domain includes sequences that are complementary to each other and which, under at least some physiological conditions, form a duplexed region. In certain of these embodiments, the tail domain comprises a tail duplex domain which can form a tail duplexed region. In certain embodiments, the tail duplexed region is 3, 4, 5, 6, 7, 8, 9, 10, 11, or 12 bp in length. In certain embodiments, the tail domain comprises a single stranded domain 3′ to the tail duplex domain that does not form a duplex. In certain of these embodiments, the single stranded domain is 3 to 10 nucleotides in length, e.g., 3, 4, 5, 6, 7, 8, 9, 10, or 4 to 6 nucleotides in length.

[0671] In certain embodiments, the tail domain does not comprise any modifications. In other embodiments, the tail domain or one or more nucleotides therein have a modification, including but not limited to the modifications set forth herein. In certain embodiments, one or more nucleotides of the tail domain may comprise a 2′ modification (e.g., a modification at the 2′ position on ribose), e.g., a 2-acetylation, e.g., a 2′ methylation. In certain embodiments, the backbone of the tail domain can be modified with a phosphorothioate. In certain embodiments, modifications to one or more nucleotides of the tail domain render the tail domain and/or the gRNA comprising the tail domain less susceptible to degradation or more bio-compatible, e.g., less immunogenic. In certain embodiments, the tail domain includes 1, 2, 3, 4, 5, 6, 7, or 8 or more modifications, and in certain of these embodiments the tail domain includes 1, 2, 3, or 4 modifications within five nucleotides of its 5′ and/or 3′ end. In certain embodiments, the tail domain comprises modifications at two or more consecutive nucleotides.

[0672] In certain embodiments, modifications to one or more nucleotides in the tail domain are selected to not interfere with targeting efficacy, which can be evaluated by testing a candidate modification as set forth below. gRNAs having a candidate tail domain having a selected length, sequence, degree of complementarity, or degree of modification can be evaluated using a system as set forth below. The candidate tail domain can be placed, either alone or with one or more other candidate changes in a gRNA molecule/Cas9 molecule system known to be functional with a selected target, and evaluated.

[0673] In certain embodiments, the tail domain includes nucleotides at the 3′ end that are related to the method of in vitro or in vivo transcription. When a T7 promoter is used for in vitro transcription of the gRNA, these nucleotides may be any nucleotides present before the 3′ end of the DNA template. In certain embodiments, the gRNA molecule includes a 3′ polyA tail that is prepared by in vitro transcription from a DNA template. In certain embodiments, the 5′ nucleotide of the targeting domain of the gRNA molecule is a guanine nucleotide, the DNA template comprises a T7 promoter sequence located immediately upstream of the sequence that corresponds to the targeting domain, and the 3′ nucleotide of the T7 promoter sequence is not a guanine nucleotide. In certain embodiments, the 5′ nucleotide of the targeting domain of the gRNA molecule is not a guanine nucleotide, the DNA template comprises a T7 promoter sequence located immediately upstream of the sequence that corresponds to the targeting domain, and the 3′ nucleotide of the T7 promoter sequence is a guanine nucleotide which is downstream of a nucleotide other than a guanine nucleotide.

[0674] When a U6 promoter is used for in vivo transcription, these nucleotides may be the sequence UUUUUU. When an H1 promoter is used for transcription, these nucleotides may be the sequence UUUU. When alternate pol-III promoters are used, these nucleotides may be various numbers of uracil bases depending on, e.g., the termination signal of the pol-III promoter, or they may include alternate bases.

[0675] In certain embodiments, the proximal and tail domain taken together comprise, consist of, or consist essentially of the sequence set forth in SEQ ID NOs:32, 33, 34, 35, 36, or 37.

[0676] 7.7 Exemplary Unimolecular/Chimeric gRNAs

[0677] In certain embodiments, a gRNA as disclosed herein has the structure: 5′ [targeting domain]-[first complementarity domain]-[linking domain]-[second complementarity domain]-[proximal domain]-[tail domain]-3′, wherein:

[0678] the targeting domain comprises a core domain and optionally a secondary domain, and is 10 to 50 nucleotides in length;

[0679] the first complementarity domain is 5 to 25 nucleotides in length and, in certain embodiments has at least about 50%, about 60%, about 70%, about 80%, about 85%, about 90%, or about 95% homology with a reference first complementarity domain disclosed herein; the linking domain is 1 to 5 nucleotides in length;

[0680] the second complementarity domain is 5 to 27 nucleotides in length and, in certain embodiments has at least about 50%, about 60%, about 70%, about 80%, about 85%, about 90%, or about 95% homology with a reference second complementarity domain disclosed herein; the proximal domain is 5 to 20 nucleotides in length and, in certain embodiments has at least about 50%, about 60%, about 70%, about 80%, about 85%, about 90%, or about 95% homology with a reference proximal domain disclosed herein; and

[0681] the tail domain is absent or a nucleotide sequence is 1 to 50 nucleotides in length and, in certain embodiments has at least about 50%, about 60%, about 70%, about 80%, about 85%, about 90%, or about 95% homology with a reference tail domain disclosed herein.

[0682] In certain embodiments, a unimolecular gRNA as disclosed herein comprises, preferably from 5′ to 3′:

[0683] a targeting domain, e.g., comprising 10-50 nucleotides;

[0684] a first complementarity domain, e.g., comprising 15, 16, 17, 18, 19, 20, 21, 22, 23, 24, 25, or 26 nucleotides;

[0685] a linking domain;

[0686] a second complementarity domain;

[0687] a proximal domain; and

[0688] a tail domain,

wherein,

[0689] (a) the proximal and tail domain, when taken together, comprise at least 15, 18, 20, 25, 30, 31, 35, 40, 45, 49, 50, or 53 nucleotides;

[0690] (b) there are at least 15, 18, 20, 25, 30, 31, 35, 40, 45, 49, 50, or 53 nucleotides 3′ to the last nucleotide of the second complementarity domain; or

[0691] (c) there are at least 16, 19, 21, 26, 31, 32, 36, 41, 46, 50, 51, or 54 nucleotides 3′ to the last nucleotide of the second complementarity domain that is complementary to its corresponding nucleotide of the first complementarity domain.

[0692] In certain embodiments, the sequence from (a), (b), and/or (c) has at least about 50%, about 60%, about 70%, about 75%, about 60%, about 70%, about 80%, about 85%, about 90%, about 95%, or about 99% homology with the corresponding sequence of a naturally occurring gRNA, or with a gRNA described herein.

[0693] In certain embodiments, the proximal and tail domain, when taken together, comprise at least 15, 18, 20, 25, 30, 31, 35, 40, 45, 49, 50, or 53 nucleotides.

[0694] In certain embodiments, there are at least 15, 18, 20, 25, 30, 31, 35, 40, 45, 49, 50, or 53 nucleotides 3′ to the last nucleotide of the second complementarity domain.

[0695] In certain embodiments, there are at least 16, 19, 21, 26, 31, 32, 36, 41, 46, 50, 51, or 54 nucleotides 3′ to the last nucleotide of the second complementarity domain that are complementary to the corresponding nucleotides of the first complementarity domain.

[0696] In certain embodiments, the targeting domain consists of, consists essentially of, or comprises 16, 17, 18, 19, 20, 21, 22, 23, 24, 25, or 26 nucleotides (e.g., 16, 17, 18, 19, 20, 21, 22, 23, 24, 25, or 26 consecutive nucleotides) complementary or partially complementary to the target domain or a portion thereof, e.g., the targeting domain is 16, 17, 18, 19, 20, 21, 22, 23, 24, 25, or 26 nucleotides in length. In certain of these embodiments, the targeting domain is complementary to the target domain over the entire length of the targeting domain, the entire length of the target domain, or both.

[0697] In certain embodiments, a unimolecular or chimeric gRNA molecule disclosed herein (comprising a targeting domain, a first complementary domain, a linking domain, a second complementary domain, a proximal domain and, optionally, a tail domain) comprises the amino acid sequence set forth in SEQ ID NO:42, wherein the targeting domain is listed as 20 N's (residues 1-20) but may range in length from 16 to 26 nucleotides, and wherein the final six residues (residues 97-102) represent a termination signal for the U6 promoter buy may be absent or fewer in number. In certain embodiments, the unimolecular, or chimeric, gRNA molecule is a S. pyogenes gRNA molecule.

[0698] In certain embodiments, a unimolecular or chimeric gRNA molecule disclosed herein (comprising a targeting domain, a first complementary domain, a linking domain, a second complementary domain, a proximal domain and, optionally, a tail domain) comprises the amino acid sequence set forth in SEQ ID NO:38, wherein the targeting domain is listed as 20 Ns (residues 1-20) but may range in length from 16 to 26 nucleotides, and wherein the final six residues (residues 97-102) represent a termination signal for the U6 promoter but may be absent or fewer in number. In certain embodiments, the unimolecular or chimeric gRNA molecule is an S. aureus gRNA molecule.

[0699] The sequences and structures of exemplary chimeric gRNAs are also shown in FIGS. 1H-1I.

[0700] 7.8 Exemplary Modular gRNAs

[0701] In certain embodiments, a modular gRNA disclosed herein comprises:

[0702] a first strand comprising, preferably from 5′ to 3′;

[0703] a targeting domain, e.g., comprising 15, 16, 17, 18, 19, 20, 21, 22, 23, 24, 25, or 26 nucleotides;

[0704] a first complementarity domain; and

[0705] a second strand, comprising, preferably from 5′ to 3′:

[0706] optionally a 5′ extension domain;

[0707] a second complementarity domain;

[0708] a proximal domain; and

[0709] a tail domain,

wherein:

[0710] (a) the proximal and tail domain, when taken together, comprise at least 15, 18, 20, 25, 30, 31, 35, 40, 45, 49, 50, or 53 nucleotides;

[0711] (b) there are at least 15, 18, 20, 25, 30, 31, 35, 40, 45, 49, 50, or 53 nucleotides 3′ to the last nucleotide of the second complementarity domain; or

[0712] (c) there are at least 16, 19, 21, 26, 31, 32, 36, 41, 46, 50, 51, or 54 nucleotides 3′ to the last nucleotide of the second complementarity domain that is complementary to its corresponding nucleotide of the first complementarity domain.

[0713] In certain embodiments, the sequence from (a), (b), or (c), has at least about 50%, about 60%, about 70%, about 80%, about 85%, about 90%, about 95%, or about 99% homology with the corresponding sequence of a naturally occurring gRNA, or with a gRNA described herein. In certain embodiments, the proximal and tail domain, when taken together, comprise at least 15, 18, 20, 25, 30, 31, 35, 40, 45, 49, 50, or 53 nucleotides.

[0714] In certain embodiments, there are at least 15, 18, 20, 25, 30, 31, 35, 40, 45, 49, 50, or 53 nucleotides 3′ to the last nucleotide of the second complementarity domain. In certain embodiments, there are at least 16, 19, 21, 26, 31, 32, 36, 41, 46, 50, 51, or 54 nucleotides 3′ to the last nucleotide of the second complementarity domain that is complementary to its corresponding nucleotide of the first complementarity domain.

[0715] In certain embodiments, the targeting domain comprises, has, or consists of, 16, 17, 18, 19, 20, 21, 22, 23, 24, 25, or 26 nucleotides (e.g., 16, 17, 18, 19, 20, 21, 22, 23, 24, 25, or 26 consecutive nucleotides) having complementarity with the target domain, e.g., the targeting domain is 16, 17, 18, 19, 20, 21, 22, 23, 24, 25, or 26 nucleotides in length.

[0716] In certain embodiments, the targeting domain consists of, consists essentially of, or comprises 16, 17, 18, 19, 20, 21, 22, 23, 24, 25, or 26 nucleotides (e.g., 16, 17, 18, 19, 20, 21, 22, 23, 24, 25, or 26 consecutive nucleotides) complementary to the target domain or a portion thereof. In certain of these embodiments, the targeting domain is complementary to the target domain over the entire length of the targeting domain, the entire length of the target domain, or both.

[0717] In certain embodiments, the targeting domain comprises, has, or consists of, 16 nucleotides (e.g., 16 consecutive nucleotides) having complementarity with the target domain, e.g., the targeting domain is 16 nucleotides in length; and the proximal and tail domain, when taken together, comprise at least 15, 18, 20, 25, 30, 31, 35, 40, 45, 49, 50, or 53 nucleotides.

[0718] In certain embodiments, the targeting domain comprises, has, or consists of, 16 nucleotides (e.g., 16 consecutive nucleotides) having complementarity with the target domain, e.g., the targeting domain is 16 nucleotides in length; and there are at least 15, 18, 20, 25, 30, 31, 35, 40, 45, 49, 50, or 53 nucleotides 3′ to the last nucleotide of the second complementarity domain.

[0719] In certain embodiments, the targeting domain comprises, has, or consists of, 16 nucleotides (e.g., 16 consecutive nucleotides) having complementarity with the target domain, e.g., the targeting domain is 16 nucleotides in length; and there are at least 16, 19, 21, 26, 31, 32, 36, 41, 46, 50, 51, or 54 nucleotides 3′ to the last nucleotide of the second complementarity domain that is complementary to its corresponding nucleotide of the first complementarity domain.

[0720] In certain embodiments, the targeting domain has, or consists of, 17 nucleotides (e.g., 17 consecutive nucleotides) having complementarity with the target domain, e.g., the targeting domain is 17 nucleotides in length; and the proximal and tail domain, when taken together, comprise at least 15, 18, 20, 25, 30, 31, 35, 40, 45, 49, 50, or 53 nucleotides.

[0721] In certain embodiments, the targeting domain has, or consists of, 17 nucleotides (e.g., 17 consecutive nucleotides) having complementarity with the target domain, e.g., the targeting domain is 17 nucleotides in length; and there are at least 15, 18, 20, 25, 30, 31, 35, 40, 45, 49, 50, or 53 nucleotides 3′ to the last nucleotide of the second complementarity domain.

[0722] In certain embodiments, the targeting domain has, or consists of, 17 nucleotides (e.g., 17 consecutive nucleotides) having complementarity with the target domain, e.g., the targeting domain is 17 nucleotides in length; and there are at least 16, 19, 21, 26, 31, 32, 36, 41, 46, 50, 51, or 54 nucleotides 3′ to the last nucleotide of the second complementarity domain that is complementary to its corresponding nucleotide of the first complementarity domain.

[0723] In certain embodiments, the targeting domain has, or consists of, 18 nucleotides (e.g., 18 consecutive nucleotides) having complementarity with the target domain, e.g., the targeting domain is 18 nucleotides in length; and the proximal and tail domain, when taken together, comprise at least 15, 18, 20, 25, 30, 31, 35, 40, 45, 49, 50, or 53 nucleotides.

[0724] In certain embodiments, the targeting domain has, or consists of, 18 nucleotides (e.g., 18 consecutive nucleotides) having complementarity with the target domain, e.g., the targeting domain is 18 nucleotides in length; and there are at least 15, 18, 20, 25, 30, 31, 35, 40, 45, 49, 50, or 53 nucleotides 3′ to the last nucleotide of the second complementarity domain.

[0725] In certain embodiments, the targeting domain has, or consists of, 18 nucleotides (e.g., 18 consecutive nucleotides) having complementarity with the target domain, e.g., the targeting domain is 18 nucleotides in length; and there are at least 16, 19, 21, 26, 31, 32, 36, 41, 46, 50, 51, or 54 nucleotides 3′ to the last nucleotide of the second complementarity domain that is complementary to its corresponding nucleotide of the first complementarity domain.

[0726] In certain embodiments, the targeting domain comprises, has, or consists of, 19 nucleotides (e.g., 19 consecutive nucleotides) having complementarity with the target domain, e.g., the targeting domain is 19 nucleotides in length; and the proximal and tail domain, when taken together, comprise at least 15, 18, 20, 25, 30, 31, 35, 40, 45, 49, 50, or 53 nucleotides.

[0727] In certain embodiments, the targeting domain comprises, has, or consists of, 19 nucleotides (e.g., 19 consecutive nucleotides) having complementarity with the target domain, e.g., the targeting domain is 19 nucleotides in length; and there are at least 15, 18, 20, 25, 30, 31, 35, 40, 45, 49, 50, or 53 nucleotides 3′ to the last nucleotide of the second complementarity domain.

[0728] In certain embodiments, the targeting domain comprises, has, or consists of, 19 nucleotides (e.g., 19 consecutive nucleotides) having complementarity with the target domain, e.g., the targeting domain is 19 nucleotides in length; and there are at least 16, 19, 21, 26, 31, 32, 36, 41, 46, 50, 51, or 54 nucleotides 3′ to the last nucleotide of the second complementarity domain that is complementary to its corresponding nucleotide of the first complementarity domain.

[0729] In certain embodiments, the targeting domain comprises, has, or consists of, 20 nucleotides (e.g., 20 consecutive nucleotides) having complementarity with the target domain, e.g., the targeting domain is 20 nucleotides in length; and the proximal and tail domain, when taken together, comprise at least 15, 18, 20, 25, 30, 31, 35, 40, 45, 49, 50, or 53 nucleotides.

[0730] In certain embodiments, the targeting domain comprises, has, or consists of, 20 nucleotides (e.g., 20 consecutive nucleotides) having complementarity with the target domain, e.g., the targeting domain is 20 nucleotides in length; and there are at least 15, 18, 20, 25, 30, 31, 35, 40, 45, 49, 50, or 53 nucleotides 3′ to the last nucleotide of the second complementarity domain.

[0731] In certain embodiments, the targeting domain comprises, has, or consists of, 20 nucleotides (e.g., 20 consecutive nucleotides) having complementarity with the target domain, e.g., the targeting domain is 20 nucleotides in length; and there are at least 16, 19, 21, 26, 31, 32, 36, 41, 46, 50, 51, or 54 nucleotides 3′ to the last nucleotide of the second complementarity domain that is complementary to its corresponding nucleotide of the first complementarity domain.

[0732] In certain embodiments, the targeting domain comprises, has, or consists of, 21 nucleotides (e.g., 21 consecutive nucleotides) having complementarity with the target domain, e.g., the targeting domain is 21 nucleotides in length; and the proximal and tail domain, when taken together, comprise at least 15, 18, 20, 25, 30, 31, 35, 40, 45, 49, 50, or 53 nucleotides.

[0733] In certain embodiments, the targeting domain comprises, has, or consists of, 21 nucleotides (e.g., 21 consecutive nucleotides) having complementarity with the target domain, e.g., the targeting domain is 21 nucleotides in length; and there are at least 15, 18, 20, 25, 30, 31, 35, 40, 45, 49, 50, or 53 nucleotides 3′ to the last nucleotide of the second complementarity domain.

[0734] In certain embodiments, the targeting domain comprises, has, or consists of, 21 nucleotides (e.g., 21 consecutive nucleotides) having complementarity with the target domain, e.g., the targeting domain is 21 nucleotides in length; and there are at least 16, 19, 21, 26, 31, 32, 36, 41, 46, 50, 51, or 54 nucleotides 3′ to the last nucleotide of the second complementarity domain that is complementary to its corresponding nucleotide of the first complementarity domain.

[0735] In certain embodiments, the targeting domain comprises, has, or consists of, 22 nucleotides (e.g., 22 consecutive nucleotides) having complementarity with the target domain, e.g., the targeting domain is 22 nucleotides in length; and the proximal and tail domain, when taken together, comprise at least 15, 18, 20, 25, 30, 31, 35, 40, 45, 49, 50, or 53 nucleotides.

[0736] In certain embodiments, the targeting domain comprises, has, or consists of, 22 nucleotides (e.g., 22 consecutive nucleotides) having complementarity with the target domain, e.g., the targeting domain is 22 nucleotides in length; and there are at least 15, 18, 20, 25, 30, 31, 35, 40, 45, 49, 50, or 53 nucleotides 3′ to the last nucleotide of the second complementarity domain.

[0737] In certain embodiments, the targeting domain comprises, has, or consists of, 22 nucleotides (e.g., 22 consecutive nucleotides) having complementarity with the target domain, e.g., the targeting domain is 22 nucleotides in length; and there are at least 16, 19, 21, 26, 31, 32, 36, 41, 46, 50, 51, or 54 nucleotides 3′ to the last nucleotide of the second complementarity domain that is complementary to its corresponding nucleotide of the first complementarity domain.

[0738] In certain embodiments, the targeting domain comprises, has, or consists of, 23 nucleotides (e.g., 23 consecutive nucleotides) having complementarity with the target domain, e.g., the targeting domain is 23 nucleotides in length; and the proximal and tail domain, when taken together, comprise at least 15, 18, 20, 25, 30, 31, 35, 40, 45, 49, 50, or 53 nucleotides.

[0739] In certain embodiments, the targeting domain comprises, has, or consists of, 23 nucleotides (e.g., 23 consecutive nucleotides) having complementarity with the target domain, e.g., the targeting domain is 23 nucleotides in length; and there are at least 15, 18, 20, 25, 30, 31, 35, 40, 45, 49, 50, or 53 nucleotides 3′ to the last nucleotide of the second complementarity domain.

[0740] In certain embodiments, the targeting domain comprises, has, or consists of, 23 nucleotides (e.g., 23 consecutive nucleotides) having complementarity with the target domain, e.g., the targeting domain is 23 nucleotides in length; and there are at least 16, 19, 21, 26, 31, 32, 36, 41, 46, 50, 51, or 54 nucleotides 3′ to the last nucleotide of the second complementarity domain that is complementary to its corresponding nucleotide of the first complementarity domain.

[0741] In certain embodiments, the targeting domain comprises, has, or consists of, 24 nucleotides (e.g., 24 consecutive nucleotides) having complementarity with the target domain, e.g., the targeting domain is 24 nucleotides in length; and the proximal and tail domain, when taken together, comprise at least 15, 18, 20, 25, 30, 31, 35, 40, 45, 49, 50, or 53 nucleotides.

[0742] In certain embodiments, the targeting domain comprises, has, or consists of, 24 nucleotides (e.g., 24 consecutive nucleotides) having complementarity with the target domain, e.g., the targeting domain is 24 nucleotides in length; and there are at least 15, 18, 20, 25, 30, 31, 35, 40, 45, 49, 50, or 53 nucleotides 3′ to the last nucleotide of the second complementarity domain.

[0743] In certain embodiments, the targeting domain comprises, has, or consists of, 24 nucleotides (e.g., 24 consecutive nucleotides) having complementarity with the target domain, e.g., the targeting domain is 24 nucleotides in length; and there are at least 16, 19, 21, 26, 31, 32, 36, 41, 46, 50, 51, or 54 nucleotides 3′ to the last nucleotide of the second complementarity domain that is complementary to its corresponding nucleotide of the first complementarity domain.

[0744] In certain embodiments, the targeting domain comprises, has, or consists of, 25 nucleotides (e.g., 25 consecutive nucleotides) having complementarity with the target domain, e.g., the targeting domain is 25 nucleotides in length; and the proximal and tail domain, when taken together, comprise at least 15, 18, 20, 25, 30, 31, 35, 40, 45, 49, 50, or 53 nucleotides.

[0745] In certain embodiments, the targeting domain comprises, has, or consists of, 25 nucleotides (e.g., 25 consecutive nucleotides) having complementarity with the target domain, e.g., the targeting domain is 25 nucleotides in length; and there are at least 15, 18, 20, 25, 30, 31, 35, 40, 45, 49, 50, or 53 nucleotides 3′ to the last nucleotide of the second complementarity domain.

[0746] In certain embodiments, the targeting domain comprises, has, or consists of, 25 nucleotides (e.g., 25 consecutive nucleotides) having complementarity with the target domain, e.g., the targeting domain is 25 nucleotides in length; and there are at least 16, 19, 21, 26, 31, 32, 36, 41, 46, 50, 51, or 54 nucleotides 3′ to the last nucleotide of the second complementarity domain that is complementary to its corresponding nucleotide of the first complementarity domain.

[0747] In certain embodiments, the targeting domain comprises, has, or consists of, 26 nucleotides (e.g., 26 consecutive nucleotides) having complementarity with the target domain, e.g., the targeting domain is 26 nucleotides in length; and the proximal and tail domain, when taken together, comprise at least 15, 18, 20, 25, 30, 31, 35, 40, 45, 49, 50, or 53 nucleotides.

[0748] In certain embodiments, the targeting domain comprises, has, or consists of, 26 nucleotides (e.g., 26 consecutive nucleotides) having complementarity with the target domain, e.g., the targeting domain is 26 nucleotides in length; and there are at least 15, 18, 20, 25, 30, 31, 35, 40, 45, 49, 50, or 53 nucleotides 3′ to the last nucleotide of the second complementarity domain.

[0749] In certain embodiments, the targeting domain comprises, has, or consists of, 26 nucleotides (e.g., 26 consecutive nucleotides) having complementarity with the target domain, e.g., the targeting domain is 26 nucleotides in length; and there are at least 16, 19, 21, 26, 31, 32, 36, 41, 46, 50, 51, or 54 nucleotides 3′ to the last nucleotide of the second complementarity domain that is complementary to its corresponding nucleotide of the first complementarity domain.

[0750] 7.9 gRNA Delivery

[0751] In certain embodiments of the methods provided herein, the methods comprise delivery of one or more (e.g., two, three, or four) gRNA molecules as described herein. In certain of these embodiments, the gRNA molecules are delivered by intravenous injection, intramuscular injection, subcutaneous injection, or inhalation. In certain embodiments, the gRNA molecules are delivered with a Cas9 molecule in a genome editing system.

8. Methods for Designing gRNAs

[0752] Methods for selecting, designing, and validating targeting domains for use in the gRNAs described herein are provided. Exemplary targeting domains for incorporation into gRNAs are also provided herein.

[0753] Methods for selection and validation of target sequences as well as off-target analyses have been described previously (see, e.g., Mali 2013; Hsu 2013; Fu 2014; Heigwer 2014; Bae 2014; Xiao 2014). For example, a software tool can be used to optimize the choice of potential targeting domains corresponding to a user's target sequence, e.g., to minimize total off-target activity across the genome. Off-target activity may be other than cleavage. For each possible targeting domain choice using S. pyogenes Cas9, the tool can identify all off-target sequences (preceding either NAG or NGG PAMs) across the genome that contain up to certain number (e.g., 1, 2, 3, 4, 5, 6, 7, 8, 9, or 10) of mismatched base-pairs. The cleavage efficiency at each off-target sequence can be predicted, e.g., using an experimentally-derived weighting scheme. Each possible targeting domain is then ranked according to its total predicted off-target cleavage; the top-ranked targeting domains represent those that are likely to have the greatest on-target cleavage and the least off-target cleavage. Other functions, e.g., automated reagent design for CRISPR construction, primer design for the on-target Surveyor assay, and primer design for high-throughput detection and quantification of off-target cleavage via next-gen sequencing, can also be included in the tool. Candidate targeting domains and gRNAs comprising those targeting domains can be functionally evaluated using methods known in the art and/or as set forth herein.

[0754] As a non-limiting example, targeting domains for use in gRNAs for use with S. pyogenes, S. aureus, and N. meningitidis Cas9s were identified using a DNA sequence searching algorithm. 17-mer and 20-mer targeting domains were designed for S. pyogenes and N. meningitidis targets, while 18-mer, 19-mer, 20-mer, 21-mer, 22-mer, 23-mer, and 24-mer targeting domains were designed for S. aureus targets. gRNA design was carried out using custom gRNA design software based on the public tool cas-offinder (Bae 2014). This software scores guides after calculating their genome-wide off-target propensity. Typically matches ranging from perfect matches to 7 mismatches are considered for guides ranging in length from 17 to 24. Once the off-target sites are computationally determined, an aggregate score is calculated for each guide and summarized in a tabular output using a web-interface. In addition to identifying potential target sites adjacent to PAM sequences, the software also identifies all PAM adjacent sequences that differ by 1, 2, 3, or more than 3 nucleotides from the selected target sites. Genomic DNA sequences for each gene (e.g., DMD gene) were obtained from the UCSC Genome browser and sequences were screened for repeat elements using the publically available RepeatMasker program. RepeatMasker searches input DNA sequences for repeated elements and regions of low complexity. The output is a detailed annotation of the repeats present in a given query sequence.

[0755] Following identification, targeting domain were ranked into tiers based on their distance to the target site, their orthogonality, and presence of a 5′ G (based on identification of close matches in the human genome containing a relevant PAM, e.g., an NGG PAM for S. pyogenes, an NNGRRT (SEQ ID NO:204) or NNGRRV (SEQ ID NO:205) PAM for S. aureus, or a NNNNGATT (SEQ ID NO: 8408) or NNNNGCTT (SEQ ID NO: 8409) PAM for N. meningitidis). Orthogonality refers to the number of sequences in the human genome that contain a minimum number of mismatches to the target sequence. A “high level of orthogonality” or “good orthogonality” may, for example, refer to 20-mer targeting domain that have no identical sequences in the human genome besides the intended target, nor any sequences that contain one or two mismatches in the target sequence. Targeting domains with good orthogonality are selected to minimize off-target DNA cleavage.

[0756] Targeting domains were identified for both single-gRNA nuclease cleavage and for a dual-gRNA paired “nickase” strategy. Criteria for selecting targeting domains and the determination of which targeting domains can be used for the dual-gRNA paired “nickase” strategy is based on two considerations:

[0757] (1) Targeting domain pairs should be oriented on the DNA such that PAMs are facing out and cutting with the D10A Cas9 nickase can result in 5′ overhangs; and

[0758] (2) An assumption that cleaving with dual nickase pairs will result in deletion of the entire intervening sequence at a reasonable frequency. However, cleaving with dual nickase pairs can also result in indel mutations at the site of only one of the gRNAs. Candidate pair members can be tested for how efficiently they remove the entire sequence versus causing indel mutations at the target site of one targeting domain.

[0759] 8.1 Targeting Domains For Use In Knocking Out the CCR5 Gene

[0760] Targeting domains for use in gRNAs for knocking out the CCR5 gene in conjunction with the methods disclosed herein were identified and ranked into 3 tiers for S. pyogenes, 5 tiers for S. aureus, and 3 tiers for N. meningitidis.

[0761] For S. pyogenes, tier 1 targeting domains were selected based on (1) distance to a target site (e.g., start codon), e.g., within 500 bp (e.g., downstream) of the target site (e.g., start codon) and (2) a high level of orthogonality. Tier 2 targeting domains were selected based on (1) distance to the target site (e.g., start codon), e.g., within 500 bp (e.g., downstream) of the target site (e.g., start codon). Tier 3 targeting domains were selected based on distance to the target site (e.g., start codon), e.g., within reminder of the coding sequence, e.g., downstream of the first 500 bp of coding sequence (e.g., anywhere from +500 (relative to the start codon) to the stop codon).

[0762] For S. aureus, tier 1 targeting domains were selected based on (1) distance to the target site (e.g., start codon), e.g., within 500 bp (e.g., downstream) of the target site (e.g., start codon), (2) a high level of orthogonality, and (3) PAM is NNGRRT. Tier 2 targeting domains were selected based on (1) distance to the target site (e.g., start codon), e.g., within 500 bp (e.g., downstream) of the target site (e.g., start codon), and (2) PAM is NNGRRT. Tier 3 targeting domains were selected based on (1) distance to a the target site (e.g., start codon), e.g., within 500 bp (e.g., downstream) of the target site (e.g., start codon), and (2) PAM is NNGRRV. Tier 4 targeting domains were selected based on (1) distance to the target site (e.g., start codon), e.g., within reminder of the coding sequence, e.g., downstream of the first 500 bp of coding sequence (e.g., anywhere from +500 (relative to the start codon) to the stop codon), and (2) PAM is NNGRRT. Tier 5 targeting domains were selected based on (1) distance to the target site (e.g., start codon), e.g., within reminder of the coding sequence, e.g., downstream of the first 500 bp of coding sequence (e.g., anywhere from +500 (relative to the start codon) to the stop codon), and (2) PAM is NNGRRV.

[0763] For N. meningitidis, tier 1 targeting domains were selected based on (1) distance to the target site, e.g., within 500 bp (e.g., downstream) of the target site (e.g., start codon) and (2) a high level of orthogonality. Tier 2 targeting domains were selected based on (1) distance to the target site (e.g., start codon), e.g., within 500 bp (e.g., downstream) of the target site (e.g., start codon). Tier 3 targeting domains were selected based on distance to the target site (e.g., start codon), e.g., within reminder of the coding sequence, e.g., downstream of the first 500 bp of coding sequence (e.g., anywhere from +500 (relative to the start codon) to the stop codon).

[0764] Note that tiers are non-inclusive (each targeting domain is listed only once for the strategy). In certain instances, no targeting domain was identified based on the criteria of the particular tier. The identified targeting domains are summarized below in Table 1.

TABLE 1
Nucleotide sequences of S. pyogenes, S. aureus, and
N. meningitidis targeting domains for knocking out the CCR5 gene

| | S. pyogenes | S. aureus | N. meningitidis |
|---|---|---|---|
| Tier 1 | SEQ ID NOS: 208 | SEQ ID NOS: | SEQ ID NOS: |
| | to 213 | 476 to 496 | 1570 to 1582 |
| Tier 2 | SEQ ID NOS: 214 | SEQ ID NOS: | SEQ ID NOS: |
| | to 339 | 497 to 545 | 1583 to 1591 |
| Tier 3 | SEQ ID NOS: 340 | SEQ ID NOS: | SEQ ID NOS: |
| | to 475 | 546 to 911 | 1592 to 1613 |
| Tier 4 | Not applicable | SEQ ID NOS: | Not applicable |
| | | 912 to 1009 | |
| Tier 5 | Not applicable | SEQ ID NOS: | Not applicable |
| | | 1010 to 1569 | |

[0765] In certain embodiments, when a single gRNA molecule is used to target a Cas9 nickase to create a single strand break in close proximity to the CCR5 target position, e.g., the gRNA is used to target either upstream of (e.g., within 500 bp upstream of the CCR5 target position), or downstream of (e.g., within 500 bp downstream of the CCR5 target position) in the CCR5 gene.

[0766] In certain embodiments, when a single gRNA molecule is used to target a Cas9 nuclease to create a double strand break to in close proximity to the CCR5 target position, e.g., the gRNA is used to target either upstream of (e.g., within 500 bp upstream of the CCR5 target position), or downstream of (e.g., within 500 bp downstream of the CCR5 target position) in the CCR5 gene.

[0767] In certain embodiments, dual targeting is used to create two double strand breaks to in close proximity to the mutation, e.g., the gRNA is used to target either upstream of (e.g., within 500 bp upstream of the CCR5 target position), or downstream of (e.g., within 500 bp downstream of the CCR5 target position) in the CCR5 gene. In certain embodiments, the first and second gRNAs are used to target two Cas9 nucleases to flank, e.g., the first of gRNA is used to target upstream of (e.g., within 500 bp upstream of the CCR5 target position), and the second gRNA is used to target downstream of (e.g., within 500 bp downstream of the CCR5 target position) in the CCR5 gene.

[0768] In certain embodiments, dual targeting is used to create a double strand break and a pair of single strand breaks to delete a genomic sequence including the CCR5 target position. In certain embodiments, the first, second and third gRNAs are used to target one Cas9 nuclease and two Cas9 nickases to flank, e.g., the first gRNA that can be used with the Cas9 nuclease is used to target upstream of (e.g., within 500 bp upstream of the CCR5 target position) or downstream of (e.g., within 500 bp downstream of the CCR5 target position), and the second and third gRNAs that can be used with the Cas9 nickase pair are used to target the opposite side of the mutation (e.g., within 500 bp upstream or downstream of the CCR5 target position) in the CCR5 gene.

[0769] In certain embodiments, when four gRNAs (e.g., two pairs) are used to target four Cas9 nickases to create four single strand breaks to delete genomic sequence including the mutation, the first pair and second pair of gRNAs are used to target four Cas9 nickases to flank, e.g., the first pair of gRNAs are used to target upstream of (e.g., within 500 bp upstream of the CCR5 target position), and the second pair of gRNAs are used to target downstream of (e.g., within 500 bp downstream of the CCR5 target position) in the CCR5 gene.

[0770] Any of the targeting domains in the tables described herein can be used with a Cas9 nickase molecule to generate a single strand break.

[0771] Any of the targeting domains in the tables described herein can be used with a Cas9 nuclease molecule to generate a double strand break.

[0772] In certain embodiments, dual targeting (e.g., dual nicking) is used to create two nicks on opposite DNA strands by using S. pyogenes, S. aureus and N. meningitidis Cas9 nickases with two targeting domains that are complementary to opposite DNA strands, e.g., a gRNA comprising any minus strand targeting domain may be paired any gRNA comprising a plus strand targeting domain provided that the two gRNAs are oriented on the DNA such that PAMs face outward and the distance between the 5′ ends of the gRNAs is 0-50 bp.

[0773] When two gRNAs designed for use to target two Cas9 molecules, one Cas9 can be one species, the second Cas9 can be from a different species. Both Cas9 species are used to generate a single or double-strand break, as desired.

[0774] 8.2 Targeting Domains For Use In Knocking Down the CCR5 Gene

[0775] Targeting domains for use in gRNAs for knocking down the CCR5 gene in conjunction with the methods disclosed herein were identified and ranked into 3 tiers for S. pyogenes, 5 tiers for S. aureus, and 3 tiers for N. meningitidis.

[0776] For S. pyogenes, tier 1 targeting domains were selected based on (1) distance to a target site (e.g., the transcription start site), e.g., within 500 bp (e.g., upstream or downstream) of the target site (e.g., the transcription start site) and (2) a high level of orthogonality. Tier 2 targeting domains were selected based on (1) distance to the target site (e.g., the transcription start site), e.g., within 500 bp (e.g., upstream or downstream) of the target site (e.g., the transcription start site). Tier 3 targeting domains were selected based on distance to the target site (e.g., the transcription start site), e.g., within the additional 500 bp upstream and downstream of the transcription start site (i.e., extending to 1 kb upstream and downstream of the transcription start site.

[0777] For S. aureus, tier 1 targeting domains were selected based on (1) distance to the target site (e.g., the transcription start site), e.g., within 500 bp (e.g., upstream or downstream) of the target site (e.g., the transcription start site), (2) a high level of orthogonality, and (3) PAM is NNGRRT. Tier 2 targeting domains were selected based on (1) distance to the target site (e.g., the transcription start site), e.g., within 500 bp (e.g., upstream or downstream) of the target site (e.g., the transcription start site), and (2) PAM is NNGRRT. Tier 3 targeting domains were selected based on (1) distance to a target site (e.g., the transcription start site), e.g., within 500 bp (e.g., upstream or downstream) of the target site (e.g., the transcription start site), and (2) PAM is NNGRRV. Tier 4 targeting domains were selected based on (1) distance to the target site (e.g., the transcription start site), e.g., within the additional 500 bp upstream and downstream of the transcription start site (i.e., extending to 1 kb upstream and downstream of the transcription start site, and (2) PAM is NNGRRT. Tier 5 targeting domains were selected based on (1) distance to the target site (e.g., the transcription start site), e.g., within the additional 500 bp upstream and downstream of the transcription start site (i.e., extending to 1 kb upstream and downstream of the transcription start site, and (2) PAM is NNGRRV.

[0778] For N. meningitidis, tier 1 targeting domains were selected based on (1) distance to a target site (e.g., the transcription start site), e.g., within 500 bp (e.g., upstream or downstream) of the target site (e.g., the transcription start site) and (2) a high level of orthogonality. Tier 2 targeting domains were selected based on (1) distance to the target site (e.g., the transcription start site), e.g., within 500 bp (e.g., upstream or downstream) of the target site (e.g., the transcription start site). Tier 3 targeting domains were selected based on distance to the target site (e.g., the transcription start site), e.g., within the additional 500 bp upstream and downstream of the transcription start site (i.e., extending to 1 kb upstream and downstream of the transcription start site.

[0779] Note that tiers are non-inclusive (each targeting domain is listed only once for the strategy). In certain instances, no targeting domain was identified based on the criteria of the particular tier. The identified targeting domains are summarized below in Table 2.

TABLE 2
Nucleotide sequences of S. pyogenes, S. aureus, and
N. meningitidis targeting domains for knocking down the CCR5 gene

| | S. pyogenes | S. aureus | N. meningitidis |
|---|---|---|---|
| Tier 1 | SEQ ID NOS: | SEQ ID NOS: | SEQ ID NOS: |
| | 1614 to 1626 | 1947 to 2045 | 3664 to 3698 |
| Tier 2 | SEQ ID NOS: | SEQ ID NOS: | SEQ ID NOS: |
| | 1627 to 1781 | 2046 to 2180 | 3699 to 3709 |
| Tier 3 | SEQ ID NOS: | SEQ ID NOS: | SEQ ID NOS: |
| | 1782 to 1946 | 2181 to 2879 | 3710 to 3739 |
| Tier 4 | Not applicable | SEQ ID NOS: | Not applicable |
| | | 2880 to 3047 | |
| Tier 5 | Not applicable | SEQ ID NOS: | Not applicable |
| | | 3048 to 3663 | |

[0780] 8.3 Targeting Domains For Use In Knocking Out the CXCR4 Gene

[0781] Targeting domains for use in gRNAs for knocking out the CXCR4 gene in conjunction with the methods disclosed herein were identified and ranked into 3 tiers for S. pyogenes, 5 tiers for S. aureus, and 3 tiers for N. meningitidis.

[0782] For S. pyogenes, tier 1 targeting domains were selected based on (1) distance to a target site (e.g., start codon), e.g., within 500 bp (e.g., downstream) of the target site (e.g., start codon) and (2) a high level of orthogonality. Tier 2 targeting domains were selected based on (1) distance to the target site (e.g., start codon), e.g., within 500 bp (e.g., downstream) of the target site (e.g., start codon). Tier 3 targeting domains were selected based on distance to the target site (e.g., start codon), e.g., within reminder of the coding sequence, e.g., downstream of the first 500 bp of coding sequence (e.g., anywhere from +500 (relative to the start codon) to the stop codon).

[0783] For S. aureus, tier 1 targeting domains were selected based on (1) distance to the target site (e.g., start codon), e.g., within 500 bp (e.g., downstream) of the target site (e.g., start codon), (2) a high level of orthogonality, and (3) PAM is NNGRRT. Tier 2 targeting domains were selected based on (1) distance to the target site (e.g., start codon), e.g., within 500 bp (e.g., downstream) of the target site (e.g., start codon), and (2) PAM is NNGRRT. Tier 3 targeting domains were selected based on (1) distance to a the target site (e.g., start codon), e.g., within 500 bp (e.g., downstream) of the target site (e.g., start codon), and (2) PAM is NNGRRV. Tier 4 targeting domains were selected based on (1) distance to the target site (e.g., start codon), e.g., within reminder of the coding sequence, e.g., downstream of the first 500 bp of coding sequence (e.g., anywhere from +500 (relative to the start codon) to the stop codon), and (2) PAM is NNGRRT. Tier 5 targeting domains were selected based on (1) distance to the target site (e.g., start codon), e.g., within reminder of the coding sequence, e.g., downstream of the first 500 bp of coding sequence (e.g., anywhere from +500 (relative to the start codon) to the stop codon), and (2) PAM is NNGRRV.

[0784] For N. meningitidis, tier 1 targeting domains were selected based on (1) distance to the target site, e.g., within 500 bp (e.g., downstream) of the target site (e.g., start codon) and (2) a high level of orthogonality. Tier 2 targeting domains were selected based on (1) distance to the target site (e.g., start codon), e.g., within 500 bp (e.g., downstream) of the target site (e.g., start codon). Tier 3 targeting domains were selected based on distance to the target site (e.g., start codon), e.g., within reminder of the coding sequence, e.g., downstream of the first 500 bp of coding sequence (e.g., anywhere from +500 (relative to the start codon) to the stop codon).

[0785] Note that tiers are non-inclusive (each targeting domain is listed only once for the strategy). In certain instances, no targeting domain was identified based on the criteria of the particular tier. The identified targeting domains are summarized below in Table 3.

TABLE 3
Nucleotide sequences of S. pyogenes, S. aureus, and
N. meningitidis targeting domains for knocking out the CXCR4 gene

| | S. pyogenes | S. aureus | N. meningitidis |
|---|---|---|---|
| Tier 1 | SEQ ID NOS: | SEQ ID NOS: | SEQ ID NOS: |
| | 3740 to 3772 | 4064 to 4125 | 5209 to 5219 |
| Tier 2 | SEQ ID NOS: | SEQ ID NOS: | SEQ ID NO: 5220 |
| | 3773 to 3911 | 4126 to 4147 | |
| Tier 3 | SEQ ID NOS: | SEQ ID NOS: | SEQ ID NOS: |
| | 3912 to 4063 | 4148 to 4592 | 5221 to 5240 |
| Tier 4 | Not applicable | SEQ ID NOS: | Not applicable |
| | | 4593 to 4753 | |
| Tier 5 | Not applicable | SEQ ID NOS: | Not applicable |
| | | 4754 to 5208 | |

[0786] In certain embodiments, when a single gRNA molecule is used to target a Cas9 nickase to create a single strand break in close proximity to the CXCR4 target position, e.g., the gRNA is used to target either upstream of (e.g., within 500 bp upstream of the CXCR4 target position), or downstream of (e.g., within 500 bp downstream of the CXCR4 target position) in the CXCR4 gene.

[0787] In certain embodiments, when a single gRNA molecule is used to target a Cas9 nuclease to create a double strand break to in close proximity to the CXCR4 target position, e.g., the gRNA is used to target either upstream of (e.g., within 500 bp upstream of the CXCR4 target position), or downstream of (e.g., within 500 bp downstream of the CXCR4 target position) in the CXCR4 gene.

[0788] In certain embodiments, dual targeting is used to create two double strand breaks to in close proximity to the mutation, e.g., the gRNA is used to target either upstream of (e.g., within 500 bp upstream of the CXCR4 target position), or downstream of (e.g., within 500 bp downstream of the CXCR4 target position) in the CXCR4 gene. In certain embodiments, the first and second gRNAs are used to target two Cas9 nucleases to flank, e.g., the first of gRNA is used to target upstream of (e.g., within 500 bp upstream of the CXCR4 target position), and the second gRNA is used to target downstream of (e.g., within 500 bp downstream of the CXCR4 target position) in the CXCR4 gene.

[0789] In certain embodiments, dual targeting is used to create a double strand break and a pair of single strand breaks to delete a genomic sequence including the CXCR4 target position. In certain embodiments, the first, second and third gRNAs are used to target one Cas9 nuclease and two Cas9 nickases to flank, e.g., the first gRNA that can be used with the Cas9 nuclease is used to target upstream of (e.g., within 500 bp upstream of the CXCR4 target position) or downstream of (e.g., within 500 bp downstream of the CXCR4 target position), and the second and third gRNAs that can be used with the Cas9 nickase pair are used to target the opposite side of the mutation (e.g., within 500 bp upstream or downstream of the CXCR4 target position) in the CXCR4 gene.

[0790] In certain embodiments, when four gRNAs (e.g., two pairs) are used to target four Cas9 nickases to create four single strand breaks to delete genomic sequence including the mutation, the first pair and second pair of gRNAs are used to target four Cas9 nickases to flank, e.g., the first pair of gRNAs are used to target upstream of (e.g., within 500 bp upstream of the CXCR4 target position), and the second pair of gRNAs are used to target downstream of (e.g., within 500 bp downstream of the CXCR4 target position) in the CXCR4 gene.

[0791] Any of the targeting domains in the tables described herein can be used with a Cas9 nickase molecule to generate a single strand break.

[0792] Any of the targeting domains in the tables described herein can be used with a Cas9 nuclease molecule to generate a double strand break.

[0793] In certain embodiments, dual targeting (e.g., dual nicking) is used to create two nicks on opposite DNA strands by using S. pyogenes, S. aureus and N. meningitidis Cas9 nickases with two targeting domains that are complementary to opposite DNA strands, e.g., a gRNA comprising any minus strand targeting domain may be paired any gRNA comprising a plus strand targeting domain provided that the two gRNAs are oriented on the DNA such that PAMs face outward and the distance between the 5′ ends of the gRNAs is 0-50 bp.

[0794] When two gRNAs designed for use to target two Cas9 molecules, one Cas9 can be one species, the second Cas9 can be from a different species. Both Cas9 species are used to generate a single or double-strand break, as desired.

[0795] 8.4 Targeting Domains For Use In Knocking Down the CXCR4 Gene

[0796] Targeting domains for use in gRNAs for knocking down the CXCR4 gene in conjunction with the methods disclosed herein were identified and ranked into 3 tiers for S. pyogenes, 5 tiers for S. aureus, and 3 tiers for N. meningitidis.

[0797] For S. pyogenes, tier 1 targeting domains were selected based on (1) distance to a target site (e.g., the transcription start site), e.g., within 500 bp (e.g., upstream or downstream) of the target site (e.g., the transcription start site) and (2) a high level of orthogonality. Tier 2 targeting domains were selected based on (1) distance to the target site (e.g., the transcription start site), e.g., within 500 bp (e.g., upstream or downstream) of the target site (e.g., the transcription start site). Tier 3 targeting domains were selected based on distance to the target site (e.g., the transcription start site), e.g., within the additional 500 bp upstream and downstream of the transcription start site (i.e., extending to 1 kb upstream and downstream of the transcription start site.

[0798] For S. aureus, tier 1 targeting domains were selected based on (1) distance to the target site (e.g., the transcription start site), e.g., within 500 bp (e.g., upstream or downstream) of the target site (e.g., the transcription start site), (2) a high level of orthogonality, and (3) PAM is NNGRRT. Tier 2 targeting domains were selected based on (1) distance to the target site (e.g., the transcription start site), e.g., within 500 bp (e.g., upstream or downstream) of the target site (e.g., the transcription start site), and (2) PAM is NNGRRT. Tier 3 targeting domains were selected based on (1) distance to a target site (e.g., the transcription start site), e.g., within 500 bp (e.g., upstream or downstream) of the target site (e.g., the transcription start site), and (2) PAM is NNGRRV. Tier 4 targeting domains were selected based on (1) distance to the target site (e.g., the transcription start site), e.g., within the additional 500 bp upstream and downstream of the transcription start site (i.e., extending to 1 kb upstream and downstream of the transcription start site, and (2) PAM is NNGRRT. Tier 5 targeting domains were selected based on (1) distance to the target site (e.g., the transcription start site), e.g., within the additional 500 bp upstream and downstream of the transcription start site (i.e., extending to 1 kb upstream and downstream of the transcription start site, and (2) PAM is NNGRRV.

[0799] For N. meningitidis, tier 1 targeting domains were selected based on (1) distance to a target site (e.g., the transcription start site), e.g., within 500 bp (e.g., upstream or downstream) of the target site (e.g., the transcription start site) and (2) a high level of orthogonality. Tier 2 targeting domains were selected based on (1) distance to the target site (e.g., the transcription start site), e.g., within 500 bp (e.g., upstream or downstream) of the target site (e.g., the transcription start site). Tier 3 targeting domains were selected based on distance to the target site (e.g., the transcription start site), e.g., within the additional 500 bp upstream and downstream of the transcription start site (i.e., extending to 1 kb upstream and downstream of the transcription start site.

[0800] Note that tiers are non-inclusive (each targeting domain is listed only once for the strategy). In certain instances, no targeting domain was identified based on the criteria of the particular tier. The identified targeting domains are summarized below in Table 4.

TABLE 4
Nucleotide sequences of S. pyogenes, S. aureus, and
N. meningitidis targeting domains for knocking down the CXCR4 gene

| | S. pyogenes | S. aureus | N. meningitidis |
|---|---|---|---|
| Tier 1 | SEQ ID NOS: | SEQ ID NOS: | SEQ ID NOS: |
| | 5241 to 5349 | 5921 to 6046 | 8356 to 8377 |
| Tier 2 | SEQ ID NOS: | SEQ ID NOS: | SEQ ID NOS: |
| | 5350 to 5615 | 6047 to 6126 | 8378 to 8379 |
| Tier 3 | SEQ ID NOS: | SEQ ID NOS: | SEQ ID NOS: |
| | 5616 to 5920 | 6127 to 7288 | 8380 to 8407 |
| Tier 4 | Not applicable | SEQ ID NOS: | Not applicable |
| | | 7289 to 7575 | |
| Tier 5 | Not applicable | SEQ ID NOS: | Not applicable |
| | | 7576 to 8355 | |

[0801] One or more of the gRNA molecules described herein, e.g., those comprising the targeting domains described in Tables 1-4 can be used with at least one Cas9 molecule (e.g., a S. pyogenes Cas9 molecule and/or a S. aureus Cas9 molecule) to form a single or a double stranded cleavage. In certain embodiments, dual targeting is used to create two double strand breaks (e.g., by using at least one Cas9 nuclease, e.g., a S. pyogenes Cas9 nuclease and/or a S. aureus Cas9 nuclease) or two nicks (e.g., by using at least one Cas9 nickase, e.g., a S. pyogenes Cas9 nickase and/or a S. aureus Cas9 nickase) on opposite DNA strands with two gRNA molecules. In certain embodiments, a presently disclosed compositio or genome editing system comprises two gRNA molecules comprising targeting domains that are complementary to opposite DNA strands, e.g., a gRNA molecule comprising any minus strand targeting domain that can be paired with a gRNA molecule comprising a plus strand targeting domain provided that the two gRNA molecules are oriented on the DNA such that PAMs face outward. In certain embodiments, two gRNA molecules are used to target two Cas9 nucleases (e.g., two S. pyogenes Cas9 nucleases, two S. aureus Cas9 nucleases, or one S. aureus Cas9 nuclease and one S. pyogenes Cas9 nuclease) or two Cas9 nickases (e.g., two S. pyogenes Cas9 nickases, two S. aureus Cas9 nickases, or one S. aureus Cas9 nickase and one Cas9 nickase). One or more of the gRNA molecules described herein, e.g., those comprising the targeting domains described in Tables 1-4 can be used with at least one Cas9 molecule to mediate the alteration of a CCR5 gene, alteration of a CXCR4 gene, or alteration of a CCR5 gene and a CXCR4 gene, described in Sections 4, 5 and 6.

### 9. Cas9 Molecules

[0802] Cas9 molecules of a variety of species can be used in the methods and compositions described herein. While the S. pyogenes, S. aureus, and N. meningitidis Cas9 molecules are the subject of much of the disclosure herein, Cas9 molecules, derived from, or based on the Cas9 proteins of other species listed herein can be used as well. These include, for example, Cas9 molecules from Acidovorax avenae, Actinobacillus pleuropneumonias, Actinobacillus succinogenes, Actinobacillus suis, Actinomyces sp., cycliphilus denitrificans, Aminomonas paucivorans, Bacillus cereus, Bacillus smithii, Bacillus thuringiensis, Bacteroides sp., Blastopirellula marina, Bradyrhizobium sp., Brevibacillus laterosporus, Campylobacter coli, Campylobacter jejuni, Campylobacter lari, Candidatus Puniceispirillum, Clostridium cellulolyticum, Clostridium perfringens, Corynebacterium accolens, Corynebacterium diphtheria, Corynebacterium matruchotii, Dinoroseobacter shibae, Eubacterium dolichum, gamma proteobacterium, Gluconacetobacter diazotrophicus, Haemophilus parainfluenzae, Haemophilus sputorum, Helicobacter canadensis, Helicobacter cinaedi, Helicobacter mustelae, Ilyobacter polytropus, Kingella kingae, Lactobacillus crispatus, Listeria ivanovii, Listeria monocytogenes, Listeriaceae bacterium, Methylocystis sp., Methylosinus trichosporium, Mobiluncus mulieris, Neisseria bacilliformis, Neisseria cinerea, Neisseria flavescens, Neisseria lactamica, Neisseria sp., Neisseria wadsworthii, Nitrosomonas sp., Parvibaculum lavamentivorans, Pasteurella multocida, Phascolarctobacterium succinatutens, Ralstonia syzygii, Rhodopseudomonas palustris, Rhodovulum sp., Simonsiella muelleri, Sphingomonas sp., Sporolactobacillus vineae, Staphylococcus lugdunensis, Streptococcus sp., Subdoligranulum p., Tistrella mobilis, Treponema sp., or Verminephrobacter eiseniae.

[0803] 9.1 Cas9 Domains

[0804] Crystal structures have been determined for two different naturally occurring bacterial Cas9 molecules (Jinek 2014) and for S. pyogenes Cas9 with a guide RNA (e.g., a synthetic fusion of crRNA and tracrRNA) (Nishimasu 2014; Anders 2014).

[0805] A naturally occurring Cas9 molecule comprises two lobes: a recognition (REC) lobe and a nuclease (NUC) lobe; each of which further comprise domains described herein. FIGS. 8A-8B provide a schematic of the organization of important Cas9 domains in the primary structure. The domain nomenclature and the numbering of the amino acid residues encompassed by each domain used throughout this disclosure is as described previously (Nishimasu 2014). The numbering of the amino acid residues is with reference to Cas9 from S. pyogenes.

[0806] The REC lobe comprises the arginine-rich bridge helix (BH), the REC1 domain, and the REC2 domain. The REC lobe does not share structural similarity with other known proteins, indicating that it is a Cas9-specific functional domain. The BH domain is a long α helix and arginine rich region and comprises amino acids 60-93 of the sequence of S. pyogenes Cas9. The REC1 domain is important for recognition of the repeat:anti-repeat duplex, e.g., of a gRNA or a tracrRNA, and is therefore critical for Cas9 activity by recognizing the target sequence. The REC1 domain comprises two REC1 motifs at amino acids 94 to 179 and 308 to 717 of the sequence of S. pyogenes Cas9. These two REC1 domains, though separated by the REC2 domain in the linear primary structure, assemble in the tertiary structure to form the REC1 domain. The REC2 domain, or parts thereof, may also play a role in the recognition of the repeat:anti-repeat duplex. The REC2 domain comprises amino acids 180-307 of the sequence of S. pyogenes Cas9.

[0807] The NUC lobe comprises the RuvC domain, the HNH domain, and the PAM-interacting (PI) domain. The RuvC domain shares structural similarity to retroviral integrase superfamily members and cleaves a single strand, e.g., the non-complementary strand of the target nucleic acid molecule. The RuvC domain is assembled from the three split RuvC motifs (RuvC I, RuvCII, and RuvCIII, which are often commonly referred to in the art as RuvCI domain, or N-terminal RuvC domain, RuvCII domain, and RuvCIII domain) at amino acids 1-59, 718-769, and 909-1098, respectively, of the sequence of S. pyogenes Cas9. Similar to the REC1 domain, the three RuvC motifs are linearly separated by other domains in the primary structure, however in the tertiary structure, the three RuvC motifs assemble and form the RuvC domain. The HNH domain shares structural similarity with HNH endonucleases and cleaves a single strand, e.g., the complementary strand of the target nucleic acid molecule. The HNH domain lies between the RuvC II-III motifs and comprises amino acids 775-908 of the sequence of S. pyogenes Cas9. The PI domain interacts with the PAM of the target nucleic acid molecule, and comprises amino acids 1099-1368 of the sequence of S. pyogenes Cas9.

[0808] 9.1.1 RuvC-Like Domain and HNH-Like Domain

[0809] In certain embodiments, a Cas9 molecule or Cas9 polypeptide comprises an HNH-like domain and a RuvC-like domain, and in certain of these embodiments cleavage activity is dependent on the RuvC-like domain and the HNH-like domain. A Cas9 molecule or Cas9 polypeptide can comprise one or more of a RuvC-like domain and an HNH-like domain. In certain embodiments, a Cas9 molecule or Cas9 polypeptide comprises a RuvC-like domain, e.g., a RuvC-like domain described below, and/or an HNH-like domain, e.g., an HNH-like domain described below.

### RuvC-Like Domains

[0810] In certain embodiments, a RuvC-like domain cleaves a single strand, e.g., the non-complementary strand of the target nucleic acid molecule. The Cas9 molecule or Cas9 polypeptide can include more than one RuvC-like domain (e.g., one, two, three or more RuvC-like domains). In certain embodiments, a RuvC-like domain is at least 5, 6, 7, 8 amino acids in length but not more than 20, 19, 18, 17, 16 or 15 amino acids in length. In certain embodiments, the Cas9 molecule or Cas9 polypeptide comprises an N-terminal RuvC-like domain of about 10 to 20 amino acids, e.g., about 15 amino acids in length.

[0811] 9.1.2 N-Terminal RuvC-Like Domains

[0812] Some naturally occurring Cas9 molecules comprise more than one RuvC-like domain with cleavage being dependent on the N-terminal RuvC-like domain. Accordingly, a Cas9 molecule or Cas9 polypeptide can comprise an N-terminal RuvC-like domain. Exemplary N-terminal RuvC-like domains are described below.

[0813] In certain embodiments, a Cas9 molecule or Cas9 polypeptide comprises an N-terminal RuvC-like domain comprising an amino acid sequence of Formula I:

(SEQ ID NO: 20)

D-X₁-G-X₂-X₃-X₄-X₅-G-X₆-X₇-X₈-X₉,

[0814] wherein,

[0815] X₁ is selected from I, V, M, L, and T (e.g., selected from I, V, and L);

[0816] X₂ is selected from T, I, V, S, N, Y, E, and L (e.g., selected from T, V, and I);

[0817] X₃ is selected from N, S, G, A, D, T, R, M, and F (e.g., A or N);

[0818] X₄ is selected from S, Y, N, and F (e.g., S);

[0819] X₅ is selected from V, I, L, C, T, and F (e.g., selected from V, I and L);

[0820] X₆ is selected from W, F, V, Y, S, and L (e.g., W);

[0821] X₇ is selected from A, S, C, V, and G (e.g., selected from A and S);

[0822] X₈ is selected from V, I, L, A, M, and H (e.g., selected from V, I, M and L); and

[0823] X₉ is selected from any amino acid or is absent (e.g., selected from T, V, I, L, Δ, F, S, A, Y, M, and R, or, e.g., selected from T, V, I, L, and Δ).

[0824] In certain embodiments, the N-terminal RuvC-like domain differs from a sequence of SEQ ID NO:20 by as many as 1 but no more than 2, 3, 4, or 5 residues.

[0825] In certain embodiments, the N-terminal RuvC-like domain is cleavage competent. In other embodiments, the N-terminal RuvC-like domain is cleavage incompetent.

[0826] In certain embodiments, a Cas9 molecule or Cas9 polypeptide comprises an N-terminal RuvC-like domain comprising an amino acid sequence of Formula II:

(SEQ ID NO: 21)

D-X₁-G-X₂-X₃-S-X₅-G-X₆-X₇-X₈-X₉,,

[0827] wherein

[0828] X₁ is selected from I, V, M, L, and T (e.g., selected from I, V, and L);

[0829] X₂ is selected from T, I, V, S, N, Y, E, and L (e.g., selected from T, V, and I);

[0830] X₃ is selected from N, S, G, A, D, T, R, M and F (e.g., A or N);

[0831] X₅ is selected from V, I, L, C, T, and F (e.g., selected from V, I and L);

[0832] X₆ is selected from W, F, V, Y, S, and L (e.g., W);

[0833] X₇ is selected from A, S, C, V, and G (e.g., selected from A and S);

[0834] X₈ is selected from V, I, L, A, M, and H (e.g., selected from V, I, M and L); and

[0835] X₉ is selected from any amino acid or is absent (e.g., selected from T, V, I, L, Δ, F, S, A, Y, M, and R or selected from e.g., T, V, I, L, and Δ).

[0836] In certain embodiments, the N-terminal RuvC-like domain differs from a sequence of SEQ ID NO:21 by as many as 1 but not more than 2, 3, 4, or 5 residues.

[0837] In certain embodiments, the N-terminal RuvC-like domain comprises an amino acid sequence of Formula III:

(SEQ ID NO: 22)

D-I-G-X₂-X₃-S-V-G-W-A-X₈-X₉,

[0838] wherein

[0839] X₂ is selected from T, I, V, S, N, Y, E, and L (e.g., selected from T, V, and I);

[0840] X₃ is selected from N, S, G, A, D, T, R, M, and F (e.g., A or N);

[0841] X₈ is selected from V, I, L, A, M, and H (e.g., selected from V, I, M and L); and

[0842] X₉ is selected from any amino acid or is absent (e.g., selected from T, V, I, L, Δ, F, S, A, Y, M, and R or selected from e.g., T, V, I, L, and Δ).

[0843] In certain embodiments, the N-terminal RuvC-like domain differs from a sequence of SEQ ID NO:22 by as many as 1 but not more than, 2, 3, 4, or 5 residues.

[0844] In certain embodiments, the N-terminal RuvC-like domain comprises an amino acid sequence of Formula IV:

(SEQ ID NO: 23)

D-I-G-T-N-S-V-G-W-A-V-X,

[0845] wherein

[0846] X is a non-polar alkyl amino acid or a hydroxyl amino acid, e.g., X is selected from V, I, L, and T (e.g., the Cas9 molecule can comprise an N-terminal RuvC-like domain shown in FIGS. 2A-2G (depicted as Y)).

[0847] In certain embodiments, the N-terminal RuvC-like domain differs from a sequence of SEQ ID NO:23 by as many as 1 but not more than, 2, 3, 4, or 5 residues.

[0848] In certain embodiments, the N-terminal RuvC-like domain differs from a sequence of an N-terminal RuvC like domain disclosed herein, e.g., in FIGS. 3A-3B, as many as 1 but no more than 2, 3, 4, or 5 residues. In certain embodiments, 1, 2, 3 or all of the highly conserved residues identified in FIGS. 3A-3B are present.

[0849] In certain embodiments, the N-terminal RuvC-like domain differs from a sequence of an N-terminal RuvC-like domain disclosed herein, e.g., in FIGS. 4A-4B, as many as 1 but no more than 2, 3, 4, or 5 residues. In certain embodiments, 1, 2, or all of the highly conserved residues identified in FIGS. 4A-4B are present.

[0850] 9.1.3 Additional RuvC-Like Domains

[0851] In addition to the N-terminal RuvC-like domain, the Cas9 molecule or Cas9 polypeptide can comprise one or more additional RuvC-like domains. In certain embodiments, the Cas9 molecule or Cas9 polypeptide comprises two additional RuvC-like domains. In certain embodiments, the additional RuvC-like domain is at least 5 amino acids in length and, e.g., less than 15 amino acids in length, e.g., 5 to 10 amino acids in length, e.g., 8 amino acids in length.

[0852] An additional RuvC-like domain can comprise an amino acid sequence of Formula V:

(SEQ ID NO: 15)

I-X₁-X₂-E-X₃-A-R-E

[0853] wherein,

[0854] X₁ is V or H;

[0855] X₂ is I, L or V (e.g., I or V); and

[0856] X₃ is M or T.

[0857] In certain embodiments, the additional RuvC-like domain comprises an amino acid sequence of Formula VI:

(SEQ ID NO: 16)

I-V-X₂-E-M-A-R-E,

[0858] wherein

[0859] X₂ is I, L or V (e.g., I or V) (e.g., the Cas9 molecule or Cas9 polypeptide can comprise an additional RuvC-like domain shown in FIG. 2A-2G (depicted as B)).

[0860] An additional RuvC-like domain can comprise an amino acid sequence of Formula VII:

(SEQ ID NO: 17)

H-H-A-X₁-D-A-X₂-X₃,

[0861] wherein

[0862] X₁ is H or L;

[0863] X₂ is R or V; and

[0864] In certain embodiments, the additional RuvC-like domain comprises the amino acid sequence: H-H-A-H-D-A-Y-L (SEQ ID NO:18).

[0865] In certain embodiments, the additional RuvC-like domain differs from a sequence of SEQ ID NOs:15-18 by as many as 1 but not more than 2, 3, 4, or 5 residues.

[0866] In certain embodiments, the sequence flanking the N-terminal RuvC-like domain has the amino acid sequence of Formula VIII:

(SEQ ID NO: 19)

K-X₁′-Y-X₂′-X₃′-X₄′-Z-T-D-X₉′-Y,

[0867] wherein

[0868] X₁′ is selected from K and P;

[0869] X₂′ is selected from V, L, I, and F (e.g., V, I and L);

[0870] X₃′ is selected from G, A and S (e.g., G);

[0871] X₄′ is selected from L, I, V, and F (e.g., L);

[0872] X₉′ is selected from D, E, N, and Q; and

[0873] Z is an N-terminal RuvC-like domain, e.g., as described above, e.g., having 5 to 20 amino acids.

[0874] 9.1.4 HNH-Like Domains

[0875] In certain embodiments, an HNH-like domain cleaves a single stranded complementary domain, e.g., a complementary strand of a double stranded nucleic acid molecule. In certain embodiments, an HNH-like domain is at least 15, 20, or 25 amino acids in length but not more than 40, 35, or 30 amino acids in length, e.g., 20 to 35 amino acids in length, e.g., 25 to 30 amino acids in length. Exemplary HNH-like domains are described below.

[0876] In certain embodiments, a Cas9 molecule or Cas9 polypeptide comprises an HNH-like domain having an amino acid sequence of Formula IX:

(SEQ ID NO: 25)

X₁-X₂-X₃-H-X₄-X₅-P-X₆-X₇-X₈-X⁹-X¹⁰-X¹¹-X¹²-X¹³-
X¹⁴-X¹⁵-N-X¹⁶-X¹⁷-X¹⁸-X¹⁹-X₂₀-X₂₁-X₂₂-X₂₃-N,

wherein

[0877] X₁ is selected from D, E, Q and N (e.g., D and E);

[0878] X² is selected from L, I, R, Q, V, M, and K;

[0879] X₃ is selected from D and E;

[0880] X₄ is selected from I, V, T, A, and L (e.g., A, I and V);

[0881] X₅ is selected from V, Y, I, L, F, and W (e.g., V, I and L);

[0882] X₆ is selected from Q, H, R, K, Y, I, L, F, and W;

[0883] X₇ is selected from S, A, D, T, and K (e.g., S and A);

[0884] X₈ is selected from F, L, V, K, Y, M, I, R, A, E, D, and Q (e.g., F);

[0885] X₉ is selected from L, R, T, I, V, S, C, Y, K, F, and G;

[0886] X₁₀ is selected from K, Q, Y, T, F, L, W, M, A, E, G, and S;

[0887] X₁₁ is selected from D, S, N, R, L, and T (e.g., D);

[0888] X₁₂ is selected from D, N and S;

[0889] X₁₃ is selected from S, A, T, G, and R (e.g., S);

[0890] X₁₄ is selected from I, L, F, S, R, Y, Q, W, D, K, and H (e.g., I, L and F);

[0891] X₁₅ is selected from D, S, I, N, E, A, H, F, L, Q, M, G, Y, and V;

[0892] X₁₆ is selected from K, L, R, M, T, and F (e.g., L, R and K);

[0893] X₁₇ is selected from V, L, I, A and T;

[0894] X₁₈ is selected from L, I, V, and A (e.g., L and I);

[0895] X₁₉ is selected from T, V, C, E, S, and A (e.g., T and V);

[0896] X₂₀ is selected from R, F, T, W, E, L, N, C, K, V, S, Q, I, Y, H, and A;

[0897] X₂₁ is selected from S, P, R, K, N, A, H, Q, G, and L;

[0898] X₂₂ is selected from D, G, T, N, S, K, A, I, E, L, Q, R, and Y; and

[0899] X₂₃ is selected from K, V, A, E, Y, I, C, L, S, T, G, K, M, D, and F.

[0900] In certain embodiments, a HNH-like domain differs from a sequence of SEQ ID NO:25 by at least one but not more than, 2, 3, 4, or 5 residues.

[0901] In certain embodiments, the HNH-like domain is cleavage competent. In certain embodiments, the HNH-like domain is cleavage incompetent.

[0902] In certain embodiments, a Cas9 molecule or Cas9 polypeptide comprises an HNH-like domain comprising an amino acid sequence of Formula X:

(SEQ ID NO: 26)

X₁-X₂-X₃-H-X₄-X₅-P-X₆-S-X₈-X₉-X₁₀-D-D-S-X₁₄-X₁₅-
N-K-V-L-X₁₉-X₂₀-X₂₁-X₂₂-X₂₃-N,

[0903] wherein

[0904] X₁ is selected from D and E;

[0905] X₂ is selected from L, I, R, Q, V, M, and K;

[0906] X₃ is selected from D and E;

[0907] X₄ is selected from I, V, T, A, and L (e.g., A, I and V);

[0908] X₅ is selected from V, Y, I, L, F, and W (e.g., V, I and L);

[0909] X₆ is selected from Q, H, R, K, Y, I, L, F, and W;

[0910] X₈ is selected from F, L, V, K, Y, M, I, R, A, E, D, and Q (e.g., F);

[0911] X₉ is selected from L, R, T, I, V, S, C, Y, K, F, and G;

[0912] X₁₀ is selected from K, Q, Y, T, F, L, W, M, A, E, G, and S;

[0913] X₁₄ is selected from I, L, F, S, R, Y, Q, W, D, K and H (e.g., I, L and F);

[0914] X₁₅ is selected from D, S, I, N, E, A, H, F, L, Q, M, G, Y, and V;

[0915] X₁₉ is selected from T, V, C, E, S, and A (e.g., T and V);

[0916] X₂₀ is selected from R, F, T, W, E, L, N, C, K, V, S, Q, I, Y, H, and A;

[0917] X₂₁ is selected from S, P, R, K, N, A, H, Q, G, and L;

[0918] X₂₂ is selected from D, G, T, N, S, K, A, I, E, L, Q, R, and Y; and

[0919] X₂₃ is selected from K, V, A, E, Y, I, C, L, S, T, G, K, M, D, and F.

[0920] In certain embodiment, the HNH-like domain differs from a sequence of SEQ ID NO:26 by 1, 2, 3, 4, or 5 residues.

[0921] In certain embodiments, a Cas9 molecule or Cas9 polypeptide comprises an HNH-like domain comprising an amino acid sequence of Formula XI:

(SEQ ID NO: 27)

X₁-V-X₃-H-I-V-P-X₆-S-X₈-X₉-X₁₀-D-D-S-X₁₄-X₁₅-N-K-
V-L-T-X₂₀-X₂₁-X₂₂-X₂₃-N,

[0922] wherein

[0923] X₁ is selected from D and E;

[0924] X₃ is selected from D and E;

[0925] X₆ is selected from Q, H, R, K, Y, I, L, and W;

[0926] X₈ is selected from F, L, V, K, Y, M, I, R, A, E, D, and Q (e.g., F);

[0927] X₉ is selected from L, R, T, I, V, S, C, Y, K, F, and G;

[0928] X₁₀ is selected from K, Q, Y, T, F, L, W, M, A, E, G, and S;

[0929] X₁₄ is selected from I, L, F, S, R, Y, Q, W, D, K, and H (e.g., I, L and F);

[0930] X₁₅ is selected from D, S, I, N, E, A, H, F, L, Q, M, G, Y, and V;

[0931] X₂₀ is selected from R, F, T, W, E, L, N, C, K, V, S, Q, I, Y, H, and A;

[0932] X₂₁ is selected from S, P, R, K, N, A, H, Q, G, and L;

[0933] X₂₂ is selected from D, G, T, N, S, K, A, I, E, L, Q, R, and Y; and

[0934] X₂₃ is selected from K, V, A, E, Y, I, C, L, S, T, G, K, M, D, and F.

[0935] In certain embodiments, the HNH-like domain differs from a sequence of SEQ ID NO:27 by 1, 2, 3, 4, or 5 residues.

[0936] In certain embodiments, a Cas9 molecule or Cas9 polypeptide comprises an HNH-like domain having an amino acid sequence of Formula XII:

(SEQ ID NO: 28)

D-X₂-D-H-I-X₅-P-Q-X₇-F-X₉-X₁₀-D-X₁₂-S-I-D-N-X₁₆-
V-L-X₁₉-X₂₀-S-X₂₂-X₂₃-N,

[0937] wherein

[0938] X₂ is selected from I and V;

[0939] X₅ is selected from I and V;

[0940] X₇ is selected from A and S;

[0941] X₉ is selected from I and L;

[0942] X₁₀ is selected from K and T;

[0943] X₁₂ is selected from D and N;

[0944] X₁₆ is selected from R, K, and L;

[0945] X₁₉ is selected from T and V;

[0946] X₂₀ is selected from S, and R;

[0947] X₂₂ is selected from K, D, and A; and

[0948] X₂₃ is selected from E, K, G, and N (e.g., the Cas9 molecule or Cas9 polypeptide can comprise an HNH-like domain as described herein).

[0949] In certain embodiments, the HNH-like domain differs from a sequence of SEQ ID NO:28 by as many as 1 but no more than 2, 3, 4, or 5 residues.

[0950] In certain embodiments, a Cas9 molecule or Cas9 polypeptide comprises the amino acid sequence of Formula XIII:

(SEQ ID NO: 24)

L-Y-Y-L-Q-N-G-X₁′-D-M-Y-X₂′-X₃′-X₄′-X₅′-L-D-I-X₆′-
X₇′-L-S-X₈′-Y-Z-N-R-X₉′-K-X₁₀′-D-X₁₁′-V-P,

[0951] wherein

[0952] X₁′ is selected from K and R;

[0953] X₂′ is selected from V and T;

[0954] X₃′ is selected from G and D;

[0955] X₄′ is selected from E, Q and D;

[0956] X₅′ is selected from E and D;

[0957] X₆′ is selected from D, N, and H;

[0958] X₇′ is selected from Y, R, and N;

[0959] X₈′ is selected from Q, D, and N;

[0960] X₉′ is selected from G and E;

[0961] X₁₀′ is selected from S and G;

[0962] X₁₁′ is selected from D and N; and

[0963] Z is an HNH-like domain, e.g., as described above.

[0964] In certain embodiments, the Cas9 molecule or Cas9 polypeptide comprises an amino acid sequence that differs from a sequence of SEQ ID NO:24 by as many as 1 but not more than 2, 3, 4, or 5 residues.

[0965] In certain embodiments, the HNH-like domain differs from a sequence of an HNH-like domain disclosed herein, e.g., in FIGS. 5A-5C, by as many as 1 but not more than 2, 3, 4, or 5 residues. In certain embodiments, 1 or both of the highly conserved residues identified in FIGS. 5A-5C are present.

[0966] In certain embodiments, the HNH -like domain differs from a sequence of an HNH-like domain disclosed herein, e.g., in FIGS. 6A-6B, by as many as 1 but not more than 2, 3, 4, or 5 residues. In certain embodiments, 1, 2, or all 3 of the highly conserved residues identified in FIGS. 6A-6B are present.

[0967] 9.2 Cas9 Activities

[0968] In certain embodiments, the Cas9 molecule or Cas9 polypeptide is capable of cleaving a target nucleic acid molecule. Typically wild-type Cas9 molecules cleave both strands of a target nucleic acid molecule. Cas9 molecules and Cas9 polypeptides can be engineered to alter nuclease cleavage (or other properties), e.g., to provide a Cas9 molecule or Cas9 polypeptide which is a nickase, or which lacks the ability to cleave target nucleic acid. A Cas9 molecule or Cas9 polypeptide that is capable of cleaving a target nucleic acid molecule is referred to herein as an eaCas9 (an enzymatically active Cas9) molecule or eaCas9 polypeptide.

[0969] In certain embodiments, an eaCas9 molecule or eaCas9 polypeptide comprises one or more of the following enzymatic activities:

[0970] a nickase activity, i.e., the ability to cleave a single strand, e.g., the non-complementary strand or the complementary strand, of a nucleic acid molecule;

[0971] a double stranded nuclease activity, i.e., the ability to cleave both strands of a double stranded nucleic acid and create a double stranded break, which in certain embodiments is the presence of two nickase activities;

[0972] an endonuclease activity;

[0973] an exonuclease activity; and

[0974] a helicase activity, i.e., the ability to unwind the helical structure of a double stranded nucleic acid.

[0975] In certain embodiments, an enzymatically active Cas9 (“eaCas9”) molecule or eaCas9 polypeptide cleaves both DNA strands and results in a double stranded break. In certain embodiments, an eaCas9 molecule or eaCas9 polypeptide cleaves only one strand, e.g., the strand to which the gRNA hybridizes to, or the strand complementary to the strand the gRNA hybridizes with. In certain embodiments, an eaCas9 molecule or eaCas9 polypeptide comprises cleavage activity associated with an HNH domain. In certain embodiments, an eaCas9 molecule or eaCas9 polypeptide comprises cleavage activity associated with a RuvC domain. In certain embodiments, an eaCas9 molecule or eaCas9 polypeptide comprises cleavage activity associated with an HNH domain and cleavage activity associated with a RuvC domain. In certain embodiments, an eaCas9 molecule or eaCas9 polypeptide comprises an active, or cleavage competent, HNH domain and an inactive, or cleavage incompetent, RuvC domain. In certain embodiments, an eaCas9 molecule or eaCas9 polypeptide comprises an inactive, or cleavage incompetent, HNH domain and an active, or cleavage competent, RuvC domain.

[0976] In certain embodiments, the Cas9 molecules or Cas9 polypeptides have the ability to interact with a gRNA molecule, and in conjunction with the gRNA molecule localize to a core target domain, but are incapable of cleaving the target nucleic acid, or incapable of cleaving at efficient rates. Cas9 molecules having no, or no substantial, cleavage activity are referred to herein as an enzymatically inactive Cas9 (“eiCas9”) molecule or eiCas9 polypeptide. For example, an eiCas9 molecule or eiCas9 polypeptide can lack cleavage activity or have substantially less, e.g., less than 20, 10, 5, 1 or 0.1% of the cleavage activity of a reference Cas9 molecule or eiCas9 polypeptide, as measured by an assay described herein.

[0977] 9.3 Targeting and PAMs

[0978] A Cas9 molecule or Cas9 polypeptide can interact with a gRNA molecule and, in concert with the gRNA molecule, localizes to a site which comprises a target domain, and in certain embodiments, a PAM sequence.

[0979] In certain embodiments, the ability of an eaCas9 molecule or eaCas9 polypeptide to interact with and cleave a target nucleic acid is PAM sequence dependent. A PAM sequence is a sequence in the target nucleic acid. In certain embodiments, cleavage of the target nucleic acid occurs upstream from the PAM sequence. eaCas9 molecules from different bacterial species can recognize different sequence motifs (e.g., PAM sequences). In certain embodiments, an eaCas9 molecule of S. pyogenes recognizes the sequence motif NGG and directs cleavage of a target nucleic acid sequence 1 to 10, e.g., 3 to 5, bp upstream from that sequence (see, e.g., Mali 2013). In certain embodiments, an eaCas9 molecule of S. thermophilus recognizes the sequence motif NGGNG (SEQ ID NO:199) and/or NNAGAAW (W=A or T) (SEQ ID NO:200) and directs cleavage of a target nucleic acid sequence 1 to 10, e.g., 3 to 5, bp upstream from these sequences (see, e.g., Horvath 2010; Deveau 2008). In certain embodiments, an eaCas9 molecule of S. mutans recognizes the sequence motif NGG and/or NAAR (R =A or G) (SEQ ID NO:201) and directs cleavage of a target nucleic acid sequence 1 to 10, e.g., 3 to 5 bp, upstream from this sequence (see, e.g., Deveau 2008). In certain embodiments, an eaCas9 molecule of S. aureus recognizes the sequence motif NNGRR (R=A or G) (SEQ ID NO:202) and directs cleavage of a target nucleic acid sequence 1 to 10, e.g., 3 to 5, bp upstream from that sequence. In certain embodiments, an eaCas9 molecule of S. aureus recognizes the sequence motif NNGRRN (R=A or G) (SEQ ID NO:203) and directs cleavage of a target nucleic acid sequence 1 to 10, e.g., 3 to 5, bp upstream from that sequence. In certain embodiments, an eaCas9 molecule of S. aureus recognizes the sequence motif NNGRRT (R=A or G) (SEQ ID NO:204) and directs cleavage of a target nucleic acid sequence 1 to 10, e.g., 3 to 5, bp upstream from that sequence. In certain embodiments, an eaCas9 molecule of S. aureus recognizes the sequence motif NNGRRV (R=A or G) (SEQ ID NO:205) and directs cleavage of a target nucleic acid sequence 1 to 10, e.g., 3 to 5, bp upstream from that sequence. In certain embodiments, an eaCas9 molecule of Neisseria meningitidis recognizes the sequence motif NNNNGATT (SEQ ID NO: 8408) or NNNGCTT (SEQ ID NO: 8409) and directs cleavage of a target nucleic acid sequence 1 to 10, e.g., 3 to 5, base pairs upstream from that sequence. See, e.g., Hou et al., PNAS Early Edition 2013, 1-6. The ability of a Cas9 molecule to recognize a PAM sequence can be determined, e.g., using a transformation assay as described previously (Jinek 2012). In the aforementioned embodiments, N can be any nucleotide residue, e.g., any of A, G, C, or T.

[0980] As is discussed herein, Cas9 molecules can be engineered to alter the PAM specificity of the Cas9 molecule.

[0981] Exemplary naturally occurring Cas9 molecules have been described previously (see, e.g., Chylinski 2013). Such Cas9 molecules include Cas9 molecules of a cluster 1 bacterial family, cluster 2 bacterial family, cluster 3 bacterial family, cluster 4 bacterial family, cluster 5 bacterial family, cluster 6 bacterial family, a cluster 7 bacterial family, a cluster 8 bacterial family, a cluster 9 bacterial family, a cluster 10 bacterial family, a cluster 11 bacterial family, a cluster 12 bacterial family, a cluster 13 bacterial family, a cluster 14 bacterial family, a cluster 15 bacterial family, a cluster 16 bacterial family, a cluster 17 bacterial family, a cluster 18 bacterial family, a cluster 19 bacterial family, a cluster 20 bacterial family, a cluster 21 bacterial family, a cluster 22 bacterial family, a cluster 23 bacterial family, a cluster 24 bacterial family, a cluster 25 bacterial family, a cluster 26 bacterial family, a cluster 27 bacterial family, a cluster 28 bacterial family, a cluster 29 bacterial family, a cluster 30 bacterial family, a cluster 31 bacterial family, a cluster 32 bacterial family, a cluster 33 bacterial family, a cluster 34 bacterial family, a cluster 35 bacterial family, a cluster 36 bacterial family, a cluster 37 bacterial family, a cluster 38 bacterial family, a cluster 39 bacterial family, a cluster 40 bacterial family, a cluster 41 bacterial family, a cluster 42 bacterial family, a cluster 43 bacterial family, a cluster 44 bacterial family, a cluster 45 bacterial family, a cluster 46 bacterial family, a cluster 47 bacterial family, a cluster 48 bacterial family, a cluster 49 bacterial family, a cluster 50 bacterial family, a cluster 51 bacterial family, a cluster 52 bacterial family, a cluster 53 bacterial family, a cluster 54 bacterial family, a cluster 55 bacterial family, a cluster 56 bacterial family, a cluster 57 bacterial family, a cluster 58 bacterial family, a cluster 59 bacterial family, a cluster 60 bacterial family, a cluster 61 bacterial family, a cluster 62 bacterial family, a cluster 63 bacterial family, a cluster 64 bacterial family, a cluster 65 bacterial family, a cluster 66 bacterial family, a cluster 67 bacterial family, a cluster 68 bacterial family, a cluster 69 bacterial family, a cluster 70 bacterial family, a cluster 71 bacterial family, a cluster 72 bacterial family, a cluster 73 bacterial family, a cluster 74 bacterial family, a cluster 75 bacterial family, a cluster 76 bacterial family, a cluster 77 bacterial family, or a cluster 78 bacterial family.

[0982] Exemplary naturally occurring Cas9 molecules include a Cas9 molecule of a cluster 1 bacterial family. Examples include a Cas9 molecule of: S. aureus, S. pyogenes (e.g., strain SF370, MGAS10270, MGAS10750, MGAS2096, MGAS315, MGAS5005, MGAS6180, MGAS9429, NZ131 and SSI-1), S. thermophilus (e.g., strain LMD-9), S. pseudoporcinus (e.g., strain SPIN 20026), S. mutans (e.g., strain UA159, NN2025), S. macacae (e.g., strain NCTC11558), S. gallolyticus (e.g., strain UCN34, ATCC BAA-2069), S. equines (e.g., strain ATCC 9812, MGCS 124), S. dysdalactiae (e.g., strain GGS 124), S. bovis (e.g., strain ATCC 700338), S. anginosus (e.g., strain F0211), S. agalactiae (e.g., strain NEM316, A909), Listeria monocytogenes (e.g., strain F6854), Listeria innocua (L. innocua, e.g., strain Clip11262), Enterococcus italicus (e.g., strain DSM 15952), or Enterococcus faecium (e.g., strain 1,231,408).

[0983] Additional exemplary Cas9 molecules are a Cas9 molecule of Neisseria meningitides (Hou et al., PNAS Early Edition 2013, 1-6 and a S. aureus cas9 molecule.

[0984] In certain embodiments, a Cas9 molecule or Cas9 polypeptide comprises an amino acid sequence:

[0985] having about 60%, about 65%, about 70%, about 75%, about 80%, about 85%, about 90%, about 95%, about 96%, about 97%, about 98% or about 99% homology with;

[0986] differs at no more than, about 2%, about 5%, about 10%, about 15%, about 20%, about 30%, or about 40% of the amino acid residues when compared with;

[0987] differs by at least 1, 2, 5, 10 or 20 amino acids, but by no more than 100, 80, 70, 60, 50, 40 or 30 amino acids from; or

[0988] identical to any Cas9 molecule sequence described herein, or to a naturally occurring Cas9 molecule sequence, e.g., a Cas9 molecule from a species listed herein (e.g., SEQ ID NOs:1, 2, 4-6, or 12) or described in Chylinski 2013. In certain embodiments, the Cas9 molecule or Cas9 polypeptide comprises one or more of the following activities: a nickase activity; a double stranded cleavage activity (e.g., an endonuclease and/or exonuclease activity); a helicase activity; or the ability, together with a gRNA molecule, to localize to a target nucleic acid.

[0989] In certain embodiments, a Cas9 molecule or Cas9 polypeptide comprises any of the amino acid sequence of the consensus sequence of FIGS. 2A-2G, wherein “*” indicates any amino acid found in the corresponding position in the amino acid sequence of a Cas9 molecule of S. pyogenes, S. thermophilus, S. mutans, or L. innocua, and “-” indicates absent. In certain embodiments, a Cas9 molecule or Cas9 polypeptide differs from the sequence of the consensus sequence disclosed in FIGS. 2A-2G by at least 1, but no more than 2, 3, 4, 5, 6, 7, 8, 9, or 10 amino acid residues. In certain embodiments, a Cas9 molecule or Cas9 polypeptide comprises the amino acid sequence of SEQ ID NO:2. In other embodiments, a Cas9 molecule or Cas9 polypeptide differs from the sequence of SEQ ID NO:2 by at least 1, but no more than 2, 3, 4, 5, 6, 7, 8, 9, or 10 amino acid residues.

[0990] A comparison of the sequence of a number of Cas9 molecules indicate that certain regions are conserved. These are identified below as:

[0991] region 1 (residues 1 to 180, or in the case of region 1′residues 120 to 180)

[0992] region 2 (residues 360 to 480);

[0993] region 3 (residues 660 to 720);

[0994] region 4 (residues 817 to 900); and

[0995] region 5 (residues 900 to 960).

[0996] In certain embodiments, a Cas9 molecule or Cas9 polypeptide comprises regions 1-5, together with sufficient additional Cas9 molecule sequence to provide a biologically active molecule, e.g., a Cas9 molecule having at least one activity described herein. In certain embodiments, each of regions 1-5, independently, have about 50%, about 60%, about 70%, about 80%, about 85%, about 90%, about 95%, about 96%, about 97%, about 98% or about 99% homology with the corresponding residues of a Cas9 molecule or Cas9 polypeptide described herein, e.g., a sequence from FIGS. 2A-2G.

[0997] In certain embodiments, a Cas9 molecule or Cas9 polypeptide comprises an amino acid sequence referred to as region 1:

[0998] having about 50%, about 60%, about 70%, about 80%, about 85%, about 90%, about 95%, about 96%, about 97%, about 98% or about 99% homology with amino acids 1-180 (the numbering is according to the motif sequence in FIG. 2; 52% of residues in the four Cas9 sequences in FIGS. 2A-2G are conserved) of the amino acid sequence of Cas9 of S. pyogenes;

[0999] differs by at least 1, 2, 5, 10 or 20 amino acids but by no more than 90, 80, 70, 60, 50, 40 or 30 amino acids from amino acids 1-180 of the amino acid sequence of Cas9 of S. pyogenes, S. thermophilus, S. mutans, or Listeria innocua; or

[1000] is identical to amino acids 1-180 of the amino acid sequence of Cas9 of S. pyogenes, S. thermophilus, S. mutans, or L. innocua.

[1001] In certain embodiments, a Cas9 molecule or Cas9 polypeptide comprises an amino acid sequence referred to as region 1′:

[1002] having about 55%, about 60%, about 65%, about 70%, about 75%, about 80%, about 85%, about 90%, about 95%, about 96%, about 97%, about 98% or about 99% homology with amino acids 120-180 (55% of residues in the four Cas9 sequences in FIG. 2 are conserved) of the amino acid sequence of Cas9 of S. pyogenes, S. thermophilus, S. mutans or L. innocua;

[1003] differs by at least 1, 2, or 5 amino acids but by no more than 35, 30, 25, 20 or 10 amino acids from amino acids 120-180 of the amino acid sequence of Cas9 of S. pyogenes, S. thermophilus, S. mutans, or L. innocua; or

[1004] is identical to amino acids 120-180 of the amino acid sequence of Cas9 of S. pyogenes, S. thermophilus, S. mutans, or L. innocua.

[1005] In certain embodiments, a Cas9 molecule or Cas9 polypeptide comprises an amino acid sequence referred to as region 2:

[1006] having about 50%, about 55%, about 60%, about 65%, about 70%, about 75%, about 80%, about 85%, about 90%, about 95%, about 96%, about 97%, about 98% or about 99% homology with amino acids 360-480 (52% of residues in the four Cas9 sequences in FIG. 2 are conserved) of the amino acid sequence of Cas9 of S. pyogenes, S. thermophilus, S. mutans, or L. innocua;

[1007] differs by at least 1, 2, or 5 amino acids but by no more than 35, 30, 25, 20 or 10 amino acids from amino acids 360-480 of the amino acid sequence of Cas9 of S. pyogenes, S. thermophilus, S. mutans, or L. innocua; or

[1008] is identical to amino acids 360-480 of the amino acid sequence of Cas9 of S. pyogenes, S. thermophilus, S. mutans, or L. innocua.

[1009] In certain embodiments, a Cas9 molecule or Cas9 polypeptide comprises an amino acid sequence referred to as region 3:

[1010] having about 55%, about 60%, about 65%, about 70%, about 75%, about 80%, about 85%, about 90%, about 95%, about 96%, about 97%, about 98%, or about 99% homology with amino acids 660-720 (56% of residues in the four Cas9 sequences in FIG. 2 are conserved) of the amino acid sequence of Cas9 of S. pyogenes, S. thermophilus, S. mutans or L. innocua;

[1011] differs by at least 1, 2, or 5 amino acids but by no more than 35, 30, 25, 20 or 10 amino acids from amino acids 660-720 of the amino acid sequence of Cas9 of S. pyogenes, S. thermophilus, S. mutans or L. innocua; or

[1012] is identical to amino acids 660-720 of the amino acid sequence of Cas9 of S. pyogenes, S. thermophilus, S. mutans or L. innocua.

[1013] In certain embodiments, a Cas9 molecule or Cas9 polypeptide comprises an amino acid sequence referred to as region 4:

[1014] having about 50%, about 55%, about 60%, about 65%, about 70%, about 75%, about 80%, about 85%, about 90%, about 95%, about 96%, about 97%, about 98%, or about 99% homology with amino acids 817-900 (55% of residues in the four Cas9 sequences in FIGS. 2A-2G are conserved) of the amino acid sequence of Cas9 of S. pyogenes, S. thermophilus, S. mutans, or L. innocua;

[1015] differs by at least 1, 2, or 5 amino acids but by no more than 35, 30, 25, 20 or 10 amino acids from amino acids 817-900 of the amino acid sequence of Cas9 of S. pyogenes, S. thermophilus, S. mutans, or L. innocua; or

[1016] is identical to amino acids 817-900 of the amino acid sequence of Cas9 of S. pyogenes, S. thermophilus, S. mutans, or L. innocua.

[1017] In certain embodiments, a Cas9 molecule or Cas9 polypeptide comprises an amino acid sequence referred to as region 5:

[1018] having about 50%, about 55%, about 60%, about 65%, about 70%, about 75%, about 80%, about 85%, about 90%, about 95%, about 96%, about 97%, about 98%, or about 99% homology with amino acids 900-960 (60% of residues in the four Cas9 sequences in FIGS. 2A-2G are conserved) of the amino acid sequence of Cas9 of S. pyogenes, S. thermophilus, S. mutans, or L. innocua;

[1019] differs by at least 1, 2, or 5 amino acids but by no more than 35, 30, 25, 20 or 10 amino acids from amino acids 900-960 of the amino acid sequence of Cas9 of S. pyogenes, S. thermophilus, S. mutans, or L. innocua; or

[1020] is identical to amino acids 900-960 of the amino acid sequence of Cas9 of S. pyogenes, S. thermophilus, S. mutans, or L. innocua.

[1021] 9.4 Engineered or Altered Cas9

[1022] Cas9 molecules and Cas9 polypeptides described herein can possess any of a number of properties, including nuclease activity (e.g., endonuclease and/or exonuclease activity); helicase activity; the ability to associate functionally with a gRNA molecule; and the ability to target (or localize to) a site on a nucleic acid (e.g., PAM recognition and specificity). In certain embodiments, a Cas9 molecule or Cas9 polypeptide can include all or a subset of these properties. In certain embodiments, a Cas9 molecule or Cas9 polypeptide has the ability to interact with a gRNA molecule and, in concert with the gRNA molecule, localize to a site in a nucleic acid. Other activities, e.g., PAM specificity, cleavage activity, or helicase activity can vary more widely in Cas9 molecules and Cas9 polypeptides.

[1023] Cas9 molecules include engineered Cas9 molecules and engineered Cas9 polypeptides (engineered, as used in this context, means merely that the Cas9 molecule or Cas9 polypeptide differs from a reference sequences, and implies no process or origin limitation). An engineered Cas9 molecule or Cas9 polypeptide can comprise altered enzymatic properties, e.g., altered nuclease activity, (as compared with a naturally occurring or other reference Cas9 molecule) or altered helicase activity. As discussed herein, an engineered Cas9 molecule or Cas9 polypeptide can have nickase activity (as opposed to double strand nuclease activity). In certain embodiments, an engineered Cas9 molecule or Cas9 polypeptide can have an alteration that alters its size, e.g., a deletion of amino acid sequence that reduces its size, e.g., without significant effect on one or more, or any Cas9 activity. In certain embodiments, an engineered Cas9 molecule or Cas9 polypeptide can comprise an alteration that affects PAM recognition. In certain embodiments, an engineered Cas9 molecule is altered to recognize a PAM sequence other than that recognized by the endogenous wild-type PI domain. In certain embodiments, a Cas9 molecule or Cas9 polypeptide can differ in sequence from a naturally occurring Cas9 molecule but not have significant alteration in one or more Cas9 activities.

[1024] Cas9 molecules or Cas9 polypeptides with desired properties can be made in a number of ways, e.g., by alteration of a parental, e.g., naturally occurring, Cas9 molecules or Cas9 polypeptides, to provide an altered Cas9 molecule or Cas9 polypeptide having a desired property. For example, one or more mutations or differences relative to a parental Cas9 molecule, e.g., a naturally occurring or engineered Cas9 molecule, can be introduced. Such mutations and differences comprise: substitutions (e.g., conservative substitutions or substitutions of non-essential amino acids); insertions; or deletions. In certain embodiments, a Cas9 molecule or Cas9 polypeptide can comprises one or more mutations or differences, e.g., at least 1, 2, 3, 4, 5, 10, 15, 20, 30, 40 or 50 mutations but less than 200, 100, or 80 mutations relative to a reference, e.g., a parental, Cas9 molecule.

[1025] In certain embodiments, a mutation or mutations do not have a substantial effect on a Cas9 activity, e.g. a Cas9 activity described herein. In certain embodiments, a mutation or mutations have a substantial effect on a Cas9 activity, e.g. a Cas9 activity described herein.

[1026] 9.5 Modified-Cleavage Cas9

[1027] In certain embodiments, a Cas9 molecule or Cas9 polypeptide comprises a cleavage property that differs from naturally occurring Cas9 molecules, e.g., that differs from the naturally occurring Cas9 molecule having the closest homology. For example, a Cas9 molecule or Cas9 polypeptide can differ from naturally occurring Cas9 molecules, e.g., a Cas9 molecule of S. pyogenes, as follows: its ability to modulate, e.g., decreased or increased, cleavage of a double stranded nucleic acid (endonuclease and/or exonuclease activity), e.g., as compared to a naturally occurring Cas9 molecule (e.g., a Cas9 molecule of S. pyogenes); its ability to modulate, e.g., decreased or increased, cleavage of a single strand of a nucleic acid, e.g., a non-complementary strand of a nucleic acid molecule or a complementary strand of a nucleic acid molecule (nickase activity), e.g., as compared to a naturally occurring Cas9 molecule (e.g., a Cas9 molecule of S. pyogenes); or the ability to cleave a nucleic acid molecule, e.g., a double stranded or single stranded nucleic acid molecule, can be eliminated.

[1028] In certain embodiments, an eaCas9 molecule or eaCas9 polypeptide comprises one or more of the following activities: cleavage activity associated with an N-terminal RuvC-like domain; cleavage activity associated with an HNH-like domain; cleavage activity associated with an HNH-like domain and cleavage activity associated with an N-terminal RuvC-like domain.

[1029] In certain embodiments, an eaCas9 molecule or eaCas9 polypeptide comprises an active, or cleavage competent, HNH-like domain (e.g., an HNH-like domain described herein, e.g., SEQ ID NOs:24-28) and an inactive, or cleavage incompetent, N-terminal RuvC-like domain. An exemplary inactive, or cleavage incompetent N-terminal RuvC-like domain can have a mutation of an aspartic acid in an N-terminal RuvC-like domain, e.g., an aspartic acid at position 9 of the consensus sequence disclosed in FIGS. 2A-2G or an aspartic acid at position 10 of SEQ ID NO:2, e.g., can be substituted with an alanine. In certain embodiments, the eaCas9 molecule or eaCas9 polypeptide differs from wild-type in the N-terminal RuvC-like domain and does not cleave the target nucleic acid, or cleaves with significantly less efficiency, e.g., less than about 20%, about 10%, about 5%, about 1% or about 0.1% of the cleavage activity of a reference Cas9 molecule, e.g., as measured by an assay described herein. The reference Cas9 molecule can by a naturally occurring unmodified Cas9 molecule, e.g., a naturally occurring Cas9 molecule such as a Cas9 molecule of S. pyogenes, S. aureus, or S. thermophilus. In certain embodiments, the reference Cas9 molecule is the naturally occurring Cas9 molecule having the closest sequence identity or homology.

[1030] In certain embodiments, an eaCas9 molecule or eaCas9 polypeptide comprises an inactive, or cleavage incompetent, HNH domain and an active, or cleavage competent, N-terminal RuvC-like domain (e.g., a RuvC-like domain described herein, e.g., SEQ ID NOs:15-23). Exemplary inactive, or cleavage incompetent HNH-like domains can have a mutation at one or more of: a histidine in an HNH-like domain, e.g., a histidine shown at position 856 of the consensus sequence disclosed in FIGS. 2A-2G, e.g., can be substituted with an alanine; and one or more asparagines in an HNH-like domain, e.g., an asparagine shown at position 870 of the consensus sequence disclosed in FIGS. 2A-2G and/or at position 879 of the consensus sequence disclosed in FIGS. 2A-2G, e.g., can be substituted with an alanine. In certain embodiments, the eaCas9 differs from wild-type in the HNH-like domain and does not cleave the target nucleic acid, or cleaves with significantly less efficiency, e.g., less than about 20%, about 10%, about 5%, about 1% or about 0.1% of the cleavage activity of a reference Cas9 molecule, e.g., as measured by an assay described herein. The reference Cas9 molecule can by a naturally occurring unmodified Cas9 molecule, e.g., a naturally occurring Cas9 molecule such as a Cas9 molecule of S. pyogenes, S. aureus, or S. thermophilus. In certain embodiments, the reference Cas9 molecule is the naturally occurring Cas9 molecule having the closest sequence identity or homology.

[1031] In certain embodiments, exemplary Cas9 activities comprise one or more of PAM specificity, cleavage activity, and helicase activity. A mutation(s) can be present, e.g., in: one or more RuvC domains, e.g., an N-terminal RuvC domain; an HNH domain; a region outside the RuvC domains and the HNH domain. In certain embodiments, a mutation(s) is present in a RuvC domain. In certain embodiments, a mutation(s) is present in an HNH domain. In certain embodiments, mutations are present in both a RuvC domain and an HNH domain.

[1032] Exemplary mutations that may be made in the RuvC domain or HNH domain with reference to the S. pyogenes Cas9 sequence include: D10A, E762A, H840A, N854A, N863A and/or D986A. Exemplary mutations that may be made in the RuvC domain with reference to the S. aureus Cas9 sequence include N580A (see, e.g., SEQ ID NO:11).

[1033] Whether or not a particular sequence, e.g., a substitution, may affect one or more activity, such as targeting activity, cleavage activity, etc., can be evaluated or predicted, e.g., by evaluating whether the mutation is conservative. In certain embodiments, a “non-essential” amino acid residue, as used in the context of a Cas9 molecule, is a residue that can be altered from the wild-type sequence of a Cas9 molecule, e.g., a naturally occurring Cas9 molecule, e.g., an eaCas9 molecule, without abolishing or more preferably, without substantially altering a Cas9 activity (e.g., cleavage activity), whereas changing an “essential” amino acid residue results in a substantial loss of activity (e.g., cleavage activity).

[1034] In certain embodiments, a Cas9 molecule or Cas9 polypeptide comprises a cleavage property that differs from naturally occurring Cas9 molecules, e.g., that differs from the naturally occurring Cas9 molecule having the closest homology. For example, a Cas9 molecule can differ from naturally occurring Cas9 molecules, e.g., a Cas9 molecule of S aureus or S. pyogenes, as follows: its ability to modulate, e.g., decreased or increased, cleavage of a double stranded break (endonuclease and/or exonuclease activity), e.g., as compared to a naturally occurring Cas9 molecule (e.g., a Cas9 molecule of S aureus or S. pyogenes); its ability to modulate, e.g., decreased or increased, cleavage of a single strand of a nucleic acid, e.g., a non-complimentary strand of a nucleic acid molecule or a complementary strand of a nucleic acid molecule (nickase activity), e.g., as compared to a naturally occurring Cas9 molecule (e.g., a Cas9 molecule of S aureus or S. pyogenes); or the ability to cleave a nucleic acid molecule, e.g., a double stranded or single stranded nucleic acid molecule, can be eliminated. In certain embodiments, the nickase is S. aureus Cas9-derived nickase comprising the sequence of SEQ ID NO:10 (D10A) or SEQ ID NO:11 (N580A) (Friedland 2015).

[1035] In certain embodiments, the altered Cas9 molecule is an eaCas9 molecule comprising one or more of the following activities: cleavage activity associated with a RuvC domain; cleavage activity associated with an HNH domain; cleavage activity associated with an HNH domain and cleavage activity associated with a RuvC domain.

[1036] In certain embodiments, the altered Cas9 molecule or Cas9 polypeptide comprises a sequence in which:

[1037] the sequence corresponding to the fixed sequence of the consensus sequence disclosed in FIGS. 2A-2G differs at no more than about 1%, about 2%, about 3%, about 4%, about 5%, about 10%, about 15%, or about 20% of the fixed residues in the consensus sequence disclosed in FIGS. 2A-2G; and

[1038] the sequence corresponding to the residues identified by “*” in the consensus sequence disclosed in FIGS. 2A-2G differs at no more than about 1%, about 2%, about 3%, about 4%, about 5%, about 10%, about 15%, about 20%, about 25%, about 30%, about 35%, or about 40% of the “*” residues from the corresponding sequence of naturally occurring Cas9 molecule, e.g., an S. pyogenes, S. thermophilus, S. mutans, or L. innocua Cas9 molecule.

[1039] In certain embodiments, the altered Cas9 molecule or Cas9 polypeptide is an eaCas9 molecule or eaCas9 polypeptide comprising the amino acid sequence of S. pyogenes Cas9 disclosed in FIGS. 2A-2G with one or more amino acids that differ from the sequence of S. pyogenes (e.g., substitutions) at one or more residues (e.g., 2, 3, 5, 10, 15, 20, 30, 50, 70, 80, 90, 100, or 200 amino acid residues) represented by an “*” in the consensus sequence disclosed in FIGS. 2A-2G.

[1040] In certain embodiments, the altered Cas9 molecule or Cas9 polypeptide is an eaCas9 molecule or eaCas9 polypeptide comprising the amino acid sequence of S. thermophilus Cas9 disclosed in FIGS. 2A-2G with one or more amino acids that differ from the sequence of S. thermophilus (e.g., substitutions) at one or more residues (e.g., 2, 3, 5, 10, 15, 20, 30, 50, 70, 80, 90, 100, or 200 amino acid residues) represented by an “*” in the consensus sequence disclosed in FIGS. 2A-2G.

[1041] In certain embodiments, the altered Cas9 molecule or Cas9 polypeptide is an eaCas9 molecule or eaCas9 polypeptide comprising the amino acid sequence of S. mutans Cas9 disclosed in FIGS. 2A-2G with one or more amino acids that differ from the sequence of S. mutans (e.g., substitutions) at one or more residues (e.g., 2, 3, 5, 10, 15, 20, 30, 50, 70, 80, 90, 100, or 200 amino acid residues) represented by an “*” in the consensus sequence disclosed in FIGS. 2A-2G.

[1042] In certain embodiments, the altered Cas9 molecule or Cas9 polypeptide is an eaCas9 molecule or eaCas9 polypeptide comprising the amino acid sequence of L. innocua Cas9 disclosed in FIGS. 2A-2G with one or more amino acids that differ from the sequence of L. innocua (e.g., substitutions) at one or more residues (e.g., 2, 3, 5, 10, 15, 20, 30, 50, 70, 80, 90, 100, or 200 amino acid residues) represented by an “*” in the consensus sequence disclosed in FIGS. 2A-2G.

[1043] In certain embodiments, the altered Cas9 molecule or Cas9 polypeptide, e.g., an eaCas9 molecule or eaCas9 polypeptide, can be a fusion, e.g., of two of more different Cas9 molecules, e.g., of two or more naturally occurring Cas9 molecules of different species. For example, a fragment of a naturally occurring Cas9 molecule of one species can be fused to a fragment of a Cas9 molecule of a second species. As an example, a fragment of a Cas9 molecule of S. pyogenes comprising an N-terminal RuvC-like domain can be fused to a fragment of Cas9 molecule of a species other than S. pyogenes (e.g., S. thermophilus) comprising an HNH-like domain.

[1044] 9.6 Cas9 with Altered or no PAM Recognition

[1045] Naturally occurring Cas9 molecules can recognize specific PAM sequences, for example the PAM recognition sequences described above for, e.g., S. pyogenes, S. thermophilus, S. mutans, and S. aureus.

[1046] In certain embodiments, a Cas9 molecule or Cas9 polypeptide has the same PAM specificities as a naturally occurring Cas9 molecule. In certain embodiments, a Cas9 molecule or Cas9 polypeptide has a PAM specificity not associated with a naturally occurring Cas9 molecule, or a PAM specificity not associated with the naturally occurring Cas9 molecule to which it has the closest sequence homology. For example, a naturally occurring Cas9 molecule can be altered, e.g., to alter PAM recognition, e.g., to alter the PAM sequence that the Cas9 molecule or Cas9 polypeptide recognizes in order to decrease off-target sites and/or improve specificity; or eliminate a PAM recognition requirement. In certain embodiments, a Cas9 molecule or Cas9 polypeptide can be altered, e.g., to increase length of PAM recognition sequence and/or improve Cas9 specificity to high level of identity (e.g., about 98%, about 99% or about 100% match between gRNA and a PAM sequence), e.g., to decrease off-target sites and/or increase specificity. In certain embodiments, the length of the PAM recognition sequence is at least 4, 5, 6, 7, 8, 9, 10 or 15 amino acids in length. In certain embodiments, the Cas9 specificity requires at least about 90%, about 95%, about 96%, about 97%, about 98%, or about 99% homology between the gRNA and the PAM sequence. Cas9 molecules or Cas9 polypeptides that recognize different PAM sequences and/or have reduced off-target activity can be generated using directed evolution. Exemplary methods and systems that can be used for directed evolution of Cas9 molecules are described (see, e.g., Esvelt 2011). Candidate Cas9 molecules can be evaluated, e.g., by methods described below.

[1047] 9.7 Size-Optimized Cas9

[1048] Engineered Cas9 molecules and engineered Cas9 polypeptides described herein include a Cas9 molecule or Cas9 polypeptide comprising a deletion that reduces the size of the molecule while still retaining desired Cas9 properties, e.g., essentially native conformation, Cas9 nuclease activity, and/or target nucleic acid molecule recognition. Provided herein are Cas9 molecules or Cas9 polypeptides comprising one or more deletions and optionally one or more linkers, wherein a linker is disposed between the amino acid residues that flank the deletion. Methods for identifying suitable deletions in a reference Cas9 molecule, methods for generating Cas9 molecules with a deletion and a linker, and methods for using such Cas9 molecules will be apparent to one of ordinary skill in the art upon review of this document.

[1049] A Cas9 molecule, e.g., a S. aureus or S. pyogenes Cas9 molecule, having a deletion is smaller, e.g., has reduced number of amino acids, than the corresponding naturally-occurring Cas9 molecule. The smaller size of the Cas9 molecules allows increased flexibility for delivery methods, and thereby increases utility for genome editing. A Cas9 molecule can comprise one or more deletions that do not substantially affect or decrease the activity of the resultant Cas9 molecules described herein. Activities that are retained in the Cas9 molecules comprising a deletion as described herein include one or more of the following:

[1050] a nickase activity, i.e., the ability to cleave a single strand, e.g., the non-complementary strand or the complementary strand, of a nucleic acid molecule; a double stranded nuclease activity, i.e., the ability to cleave both strands of a double stranded nucleic acid and create a double stranded break, which in certain embodiments is the presence of two nickase activities;

[1051] an endonuclease activity;

[1052] an exonuclease activity;

[1053] a helicase activity, i.e., the ability to unwind the helical structure of a double stranded nucleic acid;

[1054] and recognition activity of a nucleic acid molecule, e.g., a target nucleic acid or a gRNA.

[1055] Activity of the Cas9 molecules described herein can be assessed using the activity assays described herein or in the art.

[1056] 9.8 Identifying Regions Suitable for Deletion

[1057] Suitable regions of Cas9 molecules for deletion can be identified by a variety of methods. Naturally-occurring orthologous Cas9 molecules from various bacterial species can be modeled onto the crystal structure of S. pyogenes Cas9 (Nishimasu 2014) to examine the level of conservation across the selected Cas9 orthologs with respect to the three-dimensional conformation of the protein. Less conserved or unconserved regions that are spatially located distant from regions involved in Cas9 activity, e.g., interface with the target nucleic acid molecule and/or gRNA, represent regions or domains are candidates for deletion without substantially affecting or decreasing Cas9 activity.

[1058] 9.9 Nucleic Acids Encoding Cas9 Molecules

[1059] Nucleic acids encoding the Cas9 molecules or Cas9 polypeptides, e.g., an eaCas9 molecule or eaCas9 polypeptides are provided herein. Exemplary nucleic acids encoding Cas9 molecules or Cas9 polypeptides have been described previously (see, e.g., Cong 2013; Wang 2013; Mali 2013; Jinek 2012).

[1060] In certain embodiments, a nucleic acid encoding a Cas9 molecule or Cas9 polypeptide can be a synthetic nucleic acid sequence. For example, the synthetic nucleic acid molecule can be chemically modified, e.g., as described herein. In certain embodiments, the Cas9 mRNA has one or more (e.g., all of the following properties: it is capped, polyadenylated, substituted with 5-methylcytidine and/or pseudouridine.

[1061] Additionally or alternatively, the synthetic nucleic acid sequence can be codon optimized, e.g., at least one non-common codon or less-common codon has been replaced by a common codon. For example, the synthetic nucleic acid can direct the synthesis of an optimized messenger mRNA, e.g., optimized for expression in a mammalian expression system, e.g., described herein.

[1062] Additionally or alternatively, a nucleic acid encoding a Cas9 molecule or Cas9 polypeptide may comprise a nuclear localization sequence (NLS). Nuclear localization sequences are known in the art.

[1063] An exemplary codon optimized nucleic acid sequence encoding a Cas9 molecule of S. pyogenes is set forth in SEQ ID NO:3. The corresponding amino acid sequence of an S. pyogenes Cas9 molecule is set forth in SEQ ID NO:2.

[1064] Exemplary codon optimized nucleic acid sequences encoding a Cas9 molecule of S. aureus are set forth in SEQ ID NOs:7-9, 206 and 207. In certain embodiments, the Cas9 molecule is a mutant S. aureus CasO molecule comprising a D10A mutation. In certain embodiments, a codon optimized nucleic acid sequences encoding an S. aureus Cas9 molecule is set forth in SEQ ID NO: 8. An amino acid sequence of an S. aureus Cas9 molecule is set forth in SEQ ID NO:6.

[1065] If any of the above Cas9 sequences are fused with a peptide or polypeptide at the C-terminus, it is understood that the stop codon can be removed.

[1066] 9.10 Other Cas Molecules and Cas Polypeptides

[1067] Various types of Cas molecules or Cas polypeptides can be used to practice the inventions disclosed herein. In certain embodiments, Cas molecules of Type II Cas systems are used. In certain embodiments, Cas molecules of other Cas systems are used. For example, Type I or Type III Cas molecules may be used. Exemplary Cas molecules (and Cas systems) have been described previously (see, e.g., Haft 2005 and Makarova 2011). Exemplary Cas molecules (and Cas systems) are also shown in Table 5.

TABLE 5
Cas Systems

| | | | Structure of | Families (and | |
|---|---|---|---|---|---|
| | System | | encoded | superfamily) of | |
| Gene | type or | Name from | protein (PDB | encoded | |
| name^{‡} | subtype | Haft 2005^{§} | accessions)^{¶} | protein^{#}** | Representatives |
| cas1 | Type I | cas1 | 3GOD, 3LFX | COG1518 | SERP2463, |
| | Type II | | and 2YZS | | SPy1047 and ygbT |
| | Type III | | | | |
| cas2 | Type I | cas2 | 2IVY, 2I8E | COG1343 and | SERP2462, |
| | Type II | | and 3EXC | COG3512 | SPy1048, SPy1723 |
| | Type III | | | | (N-terminal domain) |
| | | | | | and ygbF |
| cas3′ | Type I^{‡‡} | cas3 | NA | COG1203 | APE1232 and ygcB |
| cas3″ | Subtype | NA | NA | COG2254 | APE1231 and |
| | I-A | | | | BH0336 |
| | Subtype | | | | |
| | I-B | | | | |
| cas4 | Subtype | cas4 and | NA | COG1468 | APE1239 and |
| | I-A | csa1 | | | BH0340 |
| | Subtype | | | | |
| | I-B | | | | |
| | Subtype | | | | |
| | I-C | | | | |
| | Subtype | | | | |
| | I-D | | | | |
| | Subtype | | | | |
| | II-B | | | | |
| cas5 | Subtype | cas5a, | 3KG4 | COG1688 | APE1234, BH0337, |
| | I-A | cas5d, | | (RAMP) | devS and ygcI |
| | Subtype | cas5e, | | | |
| | I-B | cas5h, | | | |
| | Subtype | cas5p, cas5t | | | |
| | I-C | and cmx5 | | | |
| | Subtype | | | | |
| | I-E | | | | |
| cas6 | Subtype | cas6 and | 3I4H | COG1583 and | PF1131 and slr7014 |
| | I-A | cmx6 | | COG5551 | |
| | Subtype | | | (RAMP) | |
| | I-B | | | | |
| | Subtype | | | | |
| | I-D | | | | |
| | Subtype | | | | |
| | III-A | | | | |
| | Subtype | | | | |
| | III-B | | | | |
| cas6e | Subtype | cse3 | 1WJ9 | (RAMP) | ygcH |
| | I-E | | | | |
| cas6f | Subtype | csy4 | 2XLJ | (RAMP) | y1727 |
| | I-F | | | | |
| cas7 | Subtype | csa2, csd2, | NA | COG1857 and | devR and ygcJ |
| | I-A | cse4, csh2, | | COG3649 | |
| | Subtype | csp1 and | | (RAMP) | |
| | I-B | cst2 | | | |
| | Subtype | | | | |
| | I-C | | | | |
| | Subtype | | | | |
| | I-E | | | | |
| cas8a1 | Subtype | cmx1, cst1, | NA | BH0338-like | LA3191^{§§} and |
| | I-A^{‡‡} | csx8, csx13 | | | PG2018^{§§} |
| | | and CXXC- | | | |
| | | CXXC | | | |
| cas8a2 | Subtype | csa4 and | NA | PH0918 | AF0070, AF1873, |
| | I-A^{‡‡} | csx9 | | | MJ0385, PF0637, |
| | | | | | PH0918 and |
| | | | | | SSO1401 |
| cas8b | Subtype | csh1 and | NA | BH0338-like | MTH1090 and |
| | I-B^{‡‡} | TM1802 | | | TM1802 |
| cas8c | Subtype | csd1 and | NA | BH0338-like | BH0338 |
| | I-C^{‡‡} | csp2 | | | |
| cas9 | Type II^{‡‡} | csn1 and | NA | COG3513 | FTN_0757 and |
| | | csx12 | | | SPy1046 |
| cas10 | Type III^{‡‡} | cmr2, csm1 | NA | COG1353 | MTH326, |
| | | and csx11 | | | Rv2823c^{§§} and |
| | | | | | TM1794^{§§} |
| cas10d | Subtype | csc3 | NA | COG1353 | slr7011 |
| | I-D^{‡‡} | | | | |
| csy1 | Subtype | csy1 | NA | y1724-like | y1724 |
| | I-F^{‡‡} | | | | |
| csy2 | Subtype | csy2 | NA | (RAMP) | y1725 |
| | I-F | | | | |
| csy3 | Subtype | csy3 | NA | (RAMP) | y1726 |
| | I-F | | | | |
| cse1 | Subtype | cse1 | NA | YgcL-like | ygcL |
| | I-E^{‡‡} | | | | |
| cse2 | Subtype | cse2 | 2ZCA | YgcK-like | ygcK |
| | I-E | | | | |
| csc1 | Subtype | csc1 | NA | alr1563-like | alr1563 |
| | I-D | | | (RAMP) | |
| csc2 | Subtype | csc1 and | NA | COG1337 | slr7012 |
| | I-D | csc2 | | (RAMP) | |
| csa5 | Subtype | csa5 | NA | AF1870 | AF1870, MJ0380, |
| | I-A | | | | PF0643 and |
| | | | | | SSO1398 |
| csn2 | Subtype | csn2 | NA | SPy1049-like | SPy1049 |
| | II-A | | | | |
| csm2 | Subtype | csm2 | NA | COG1421 | MTH1081 and |
| | III-A^{‡‡} | | | | SERP2460 |
| csm3 | Subtype | csc2 and | NA | COG1337 | MTH1080 and |
| | III-A | csm3 | | (RAMP) | SERP2459 |
| csm4 | Subtype | csm4 | NA | COG1567 | MTH1079 and |
| | III-A | | | (RAMP) | SERP2458 |
| csm5 | Subtype | csm5 | NA | COG1332 | MTH1078 and |
| | III-A | | | (RAMP) | SERP2457 |
| csm6 | Subtype | APE2256 | 2WTE | COG1517 | APE2256 and |
| | III-A | and csm6 | | | SSO1445 |
| cmr1 | Subtype | cmr1 | NA | COG1367 | PF1130 |
| | III-B | | | (RAMP) | |
| cmr3 | Subtype | cmr3 | NA | COG1769 | PF1128 |
| | III-B | | | (RAMP) | |
| cmr4 | Subtype | cmr4 | NA | COG1336 | PF1126 |
| | III-B | | | (RAMP) | |
| cmr5 | Subtype | cmr5 | 2ZOP and | COG3337 | MTH324 and |
| | III-B^{‡‡} | | 2OEB | | PF1125 |
| cmr6 | Subtype | cmr6 | NA | COG1604 | PF1124 |
| | III-B | | | (RAMP) | |
| csb1 | Subtype | GSU0053 | NA | (RAMP) | Balac_1306 and |
| | I-U | | | | GSU0053 |
| csb2 | Subtype | NA | NA | (RAMP) | Balac_1305 and |
| | I-U^{§§} | | | | GSU0054 |
| csb3 | Subtype | NA | NA | (RAMP) | Balac_1303^{§§} |
| | I-U | | | | |
| csx17 | Subtype | NA | NA | NA | Btus_2683 |
| | I-U | | | | |
| csx14 | Subtype | NA | NA | NA | GSU0052 |
| | I-U | | | | |
| csx10 | Subtype | csx10 | NA | (RAMP) | Caur_2274 |
| | I-U | | | | |
| csx16 | Subtype | VVA1548 | NA | NA | VVA1548 |
| | III-U | | | | |
| csaX | Subtype | csaX | NA | NA | SSO1438 |
| | III-U | | | | |
| csx3 | Subtype | csx3 | NA | NA | AF1864 |
| | III-U | | | | |
| csx1 | Subtype | csa3, csx1, | 1XMX and | COG1517 and | MJ1666, NE0113, |
| | III-U | csx2, | 2I71 | COG4006 | PF1127 and |
| | | DXTHG, | | | TM1812 |
| | | NE0113 and | | | |
| | | TIGR02710 | | | |
| csx15 | Unknown | NA | NA | TTE2665 | TTE2665 |
| csf1 | Type U | csf1 | NA | NA | AFE_1038 |
| csf2 | Type U | csf2 | NA | (RAMP) | AFE_1039 |
| csf3 | Type U | csf3 | NA | (RAMP) | AFE_1040 |
| csf4 | Type U | csf4 | NA | NA | AFE_1037 |

### 10. Functional Analysis of Candidate Molecules

[1068] Candidate Cas9 molecules, candidate gRNA molecules, candidate Cas9 molecule/gRNA molecule complexes, can be evaluated by art-known methods or as described herein. For example, exemplary methods for evaluating the endonuclease activity of Cas9 molecule have been described previously (Jinek 2012).

[1069] 10.1 Binding and Cleavage Assay: Testing Cas9 Endonuclease Activity

[1070] The ability of a Cas9 molecule/gRNA molecule complex to bind to and cleave a target nucleic acid can be evaluated in a plasmid cleavage assay. In this assay, synthetic or in vitro-transcribed gRNA molecule is pre-annealed prior to the reaction by heating to 95° C. and slowly cooling down to room temperature. Native or restriction digest-linearized plasmid DNA (300 ng (˜8 nM)) is incubated for 60 min at 37° C. with purified Cas9 protein molecule (50-500 nM) and gRNA (50-500 nM, 1:1) in a Cas9 plasmid cleavage buffer (20 mM HEPES pH 7.5, 150 mM KC1, 0.5 mM DTT, 0.1 mM EDTA) with or without 10 mM MgCl₂. The reactions are stopped with 5× DNA loading buffer (30% glycerol, 1.2% SDS, 250 mM EDTA), resolved by a 0.8 or 1% agarose gel electrophoresis and visualized by ethidium bromide staining. The resulting cleavage products indicate whether the Cas9 molecule cleaves both DNA strands, or only one of the two strands. For example, linear DNA products indicate the cleavage of both DNA strands. Nicked open circular products indicate that only one of the two strands is cleaved.

[1071] Alternatively, the ability of a Cas9 molecule/gRNA molecule complex to bind to and cleave a target nucleic acid can be evaluated in an oligonucleotide DNA cleavage assay. In this assay, DNA oligonucleotides (10 pmol) are radiolabeled by incubating with 5 units T4 polynucleotide kinase and ˜3-6 pmol (˜20-40 mCi) [γ-32P]-ATP in 1× T4 polynucleotide kinase reaction buffer at 37° C. for 30 min, in a 50 μL reaction. After heat inactivation (65° C. for 20 min), reactions are purified through a column to remove unincorporated label. Duplex substrates (100 nM) are generated by annealing labeled oligonucleotides with equimolar amounts of unlabeled complementary oligonucleotide at 95° C. for 3 min, followed by slow cooling to room temperature. For cleavage assays, gRNA molecules are annealed by heating to 95° C. for 30 s, followed by slow cooling to room temperature. Cas9 (500 nM final concentration) is pre-incubated with the annealed gRNA molecules (500 nM) in cleavage assay buffer (20 mM HEPES pH 7.5, 100 mM KCl, 5 mM MgCl2, 1 mM DTT, 5% glycerol) in a total volume of 9 μL. Reactions are initiated by the addition of 1 μL target DNA (10 nM) and incubated for 1 h at 37° C. Reactions are quenched by the addition of 20 μL of loading dye (5 mM EDTA, 0.025% SDS, 5% glycerol in formamide) and heated to 95° C. for 5 min. Cleavage products are resolved on 12% denaturing polyacrylamide gels containing 7 M urea and visualized by phosphorimaging. The resulting cleavage products indicate that whether the complementary strand, the non-complementary strand, or both, are cleaved.

[1072] One or both of these assays can be used to evaluate the suitability of a candidate gRNA molecule or candidate Cas9 molecule.

[1073] 10.2 Binding Assay: Testing the Binding of Cas9 Molecule to Target DNA

[1074] Exemplary methods for evaluating the binding of Cas9 molecule to target DNA have been described previously , e.g., in Jinek et al., SCIENCE 2012; 337(6096):816-821.

[1075] For example, in an electrophoretic mobility shift assay, target DNA duplexes are formed by mixing of each strand (10 nmol) in deionized water, heating to 95° C. for 3 min and slow cooling to room temperature. All DNAs are purified on 8% native gels containing 1× TBE. DNA bands are visualized by UV shadowing, excised, and eluted by soaking gel pieces in DEPC-treated H₂O. Eluted DNA is ethanol precipitated and dissolved in DEPC-treated H₂O. DNA samples are 5′ end labeled with [γ-32P]-ATP using T4 polynucleotide kinase for 30 min at 37° C. Polynucleotide kinase is heat denatured at 65° C. for 20 min, and unincorporated radiolabel is removed using a column. Binding assays are performed in buffer containing 20 mM HEPES pH 7.5, 100 mM KCl, 5 mM MgCl₂, 1 mM DTT and 10% glycerol in a total volume of 10 μL. Cas9 protein molecule is programmed with equimolar amounts of pre-annealed gRNA molecule and titrated from 100 pM to 1 μM. Radiolabeled DNA is added to a final concentration of 20 pM. Samples are incubated for 1 h at 37° C. and resolved at 4° C. on an 8% native polyacrylamide gel containing 1× TBE and 5 mM MgCl₂. Gels are dried and DNA visualized by phosphorimaging.

[1076] 10.3 Differential Scanning Flourimetry (DSF)

[1077] The thermostability of Cas9-gRNA ribonucleoprotein (RNP) complexes can be measured via DSF. This technique measures the thermostability of a protein, which can increase under favorable conditions such as the addition of a binding RNA molecule, e.g., a gRNA.

[1078] The assay is performed using two different protocols, one to test the best stoichiometric ratio of gRNA:Cas9 protein and another to determine the best solution conditions for RNP formation.

[1079] To determine the best solution to form RNP complexes, a 2 uM solution of Cas9 in water+10× SYPRO Orange® (Life Technologies cat#S-6650) and dispensed into a 384 well plate. An equimolar amount of gRNA diluted in solutions with varied pH and salt is then added. After incubating at room temperature for 10′ and brief centrifugation to remove any bubbles,a Bio-Rad CFX384™ Real-Time System C1000 Touch™ Thermal Cycler with the Bio-Rad CFX Manager software is used to run a gradient from 20° C. to 90° C. with a 1° C. increase in temperature every 10 seconds.

[1080] The second assay consists of mixing various concentrations of gRNA with 2 uM Cas9 in optimal buffer from assay 1 above and incubating at RT for 10′ in a 384 well plate. An equal volume of optimal buffer +10× SYPRO Orange® (Life Technologies cat#S-6650) is added and the plate sealed with Microseal® B adhesive (MSB-1001). Following brief centrifugation to remove any bubbles, a Bio-Rad CFX384™ Real-Time System C1000 Touch™ Thermal Cycler with the Bio-Rad CFX Manager software is used to run a gradient from 20° C. to 90° C. with a 1° increase in temperature every 10 seconds.

### 11. Genome Editing Approaches

[1081] Described herein are compositions, genome editing systems and methods for targeted alteration (e.g., knockout) of the CCR5 gene or CXCR4 gene, e.g., one or both alleles of the CCR5 gene or CXCR4 gene, e.g., using one or more of the approaches or pathways described herein, e.g., using NHEJ. Described herein are also methods for targeted knockdown of the CCR5 gene or CXCR4 gene.

[1082] 11.1 NHEJ Approaches for Gene Targeting

[1083] In certain embodiments of the methods provided herein, NHEJ-mediated alteration is used to alter a CCR5 or a CXCR4 target position. As described herein, nuclease-induced non-homologous end-joining (NHEJ) can be used to target gene-specific knockouts. Nuclease-induced NHEJ can also be used to remove (e.g., delete) sequence insertions in a gene of interest.

[1084] In certain embodiments, the genomic alterations associated with the methods described herein rely on nuclease-induced NHEJ and the error-prone nature of the NHEJ repair pathway. NHEJ repairs a double-strand break in the DNA by joining together the two ends; however, generally, the original sequence is restored only if two compatible ends, exactly as they were formed by the double-strand break, are perfectly ligated. The DNA ends of the double-strand break are frequently the subject of enzymatic processing, resulting in the addition or removal of nucleotides, at one or both strands, prior to rejoining of the ends. This results in the presence of insertion and/or deletion (indel) mutations in the DNA sequence at the site of the NHEJ repair. Two-thirds of these mutations typically alter the reading frame and, therefore, produce a non-functional protein. Additionally, mutations that maintain the reading frame, but which insert or delete a significant amount of sequence, can destroy functionality of the protein. This is locus dependent as mutations in critical functional domains are likely less tolerable than mutations in non-critical regions of the protein. The indel mutations generated by NHEJ are unpredictable in nature; however, at a given break site certain indel sequences are favored and are over represented in the population, likely due to small regions of microhomology. The lengths of deletions can vary widely; they are most commonly in the 1-50 bp range, but can reach greater than 100-200 bp. Insertions tend to be shorter and often include short duplications of the sequence immediately surrounding the break site. However, it is possible to obtain large insertions, and in these cases, the inserted sequence has often been traced to other regions of the genome or to plasmid DNA present in the cells.

[1085] Because NHEJ is a mutagenic process, it can also be used to delete small sequence motifs (e.g., motifs less than or equal to 50 nucleotides in length) as long as the generation of a specific final sequence is not required. If a double-strand break is targeted near to a target sequence, the deletion mutations caused by the NHEJ repair often span, and therefore remove, the unwanted nucleotides. For the deletion of larger DNA segments, introducing two double-strand breaks, one on each side of the sequence, can result in NHEJ between the ends with removal of the entire intervening sequence. In this way, DNA segments as large as several hundred kilobases can be deleted. Both of these approaches can be used to delete specific DNA sequences; however, the error-prone nature of NHEJ may still produce indel mutations at the site of repair.

[1086] Both double strand cleaving eaCas9 molecules and single strand, or nickase, eaCas9 molecules can be used in the methods and compositions described herein to generate NHEJ-mediated indels. NHEJ-mediated indels targeted to the early coding region of a gene of interest can be used to knockout (i.e., eliminate expression of) a gene of interest. For example, early coding region of a gene of interest includes sequence immediately following a transcription start site, within a first exon of the coding sequence, or within 500 bp of the transcription start site (e.g., less than 500, 450, 400, 350, 300, 250, 200, 150, 100 or 50 bp).

[1087] 11.2 Placement of Double Strand or Single Strand Breaks Relative to the Target Position

[1088] In certain embodiments, in which a gRNA and Cas9 nuclease generate a double strand break for the purpose of inducing NHEJ-mediated indels, a gRNA, e.g., a unimolecular (or chimeric) or modular gRNA molecule, is configured to position one double-strand break in close proximity to a nucleotide of the target position. In certain embodiments, the cleavage site is between 0-30 bp away from the target position (e.g., less than 30, 25, 20, 15, 10, 9, 8, 7, 6, 5, 4, 3, 2 or 1 bp from the target position).

[1089] In certain embodiments, in which two gRNAs complexing with Cas9 nickases induce two single strand breaks for the purpose of inducing NHEJ-mediated indels, two gRNAs, e.g., independently, unimolecular (or chimeric) or modular gRNA, are configured to position two single-strand breaks to provide for NHEJ repair a nucleotide of the target position. In certain embodiments, the gRNAs are configured to position cuts at the same position, or within a few nucleotides of one another, on different strands, essentially mimicking a double strand break. In certain embodiments, the closer nick is between 0-30 bp away from the target position (e.g., less than 30, 25, 20, 15, 10, 9, 8, 7, 6, 5, 4, 3, 2 or 1 bp from the target position), and the two nicks are within 25-55 bp of each other (e.g., between 25 to 50, 25 to 45, 25 to 40, 25 to 35, 25 to 30, 50 to 55, 45 to 55, 40 to 55, 35 to 55, 30 to 55, 30 to 50, 35 to 50, 40 to 50 , 45 to 50, 35 to 45, or 40 to 45 bp) and no more than 100 bp away from each other (e.g., no more than 90, 80, 70, 60, 50, 40, 30, 20 or 10 bp). In certain embodiments, the gRNAs are configured to place a single strand break on either side of a nucleotide of the target position.

[1090] Both double strand cleaving eaCas9 molecules and single strand, or nickase, eaCas9 molecules can be used in the methods and compositions described herein to generate breaks both sides of a target position. Double strand or paired single strand breaks may be generated on both sides of a target position to remove the nucleic acid sequence between the two cuts (e.g., the region between the two breaks in deleted). In certain embodiments, two gRNAs, e.g., independently, unimolecular (or chimeric) or modular gRNA, are configured to position a double-strand break on both sides of a target position. In an alternate embodiment, three gRNAs, e.g., independently, unimolecular (or chimeric) or modular gRNA, are configured to position a double strand break (i.e., one gRNA complexes with a cas9 nuclease) and two single strand breaks or paired single stranded breaks (i.e., two gRNAs complex with Cas9 nickases) on either side of the target position. In certain embodiments, four gRNAs, e.g., independently, unimolecular (or chimeric) or modular gRNA, are configured to generate two pairs of single stranded breaks (i.e., two pairs of two gRNAs complex with Cas9 nickases) on either side of the target position. The double strand break(s) or the closer of the two single strand nicks in a pair can ideally be within 0-500 bp of the target position (e.g., no more than 450, 400, 350, 300, 250, 200, 150, 100, 50 or 25 bp from the target position). When nickases are used, the two nicks in a pair are within 25-55 bp of each other (e.g., between 25 to 50, 25 to 45, 25 to 40, 25 to 35, 25 to 30, 50 to 55, 45 to 55, 40 to 55, 35 to 55, 30 to 55, 30 to 50, 35 to 50, 40 to 50 , 45 to 50, 35 to 45, or 40 to 45 bp) and no more than 100 bp away from each other (e.g., no more than 90, 80, 70, 60, 50, 40, 30, 20, or 10 bp).

[1091] 11.3 HDR Repair, HDR-Mediated Knock-In, and Template Nucleic Acids

[1092] In certain embodiments of the methods provided herein, HDR-mediated sequence alteration is used to alter the sequence of one or more nucleotides in a DMD gene using an exogenously provided template nucleic acid (also referred to herein as a donor construct). In certain embodiments, HDR-mediated alteration of a DMD target position occurs by HDR with an exogenously provided donor template or template nucleic acid. For example, the donor construct or template nucleic acid provides for alteration of a CCR5 or a CXCR4 target position. In certain embodiments, a plasmid donor is used as a template for homologous recombination. In certain embodiments, a single stranded donor template is used as a template for alteration of the CCR5 or CXCR4 target position by alternate methods of HDR (e.g., single strand annealing) between the target sequence and the donor template. Donor template-effected alteration of a CCR5 or a CXCR4 target position depends on cleavage by a Cas9 molecule. Cleavage by Cas9 can comprise a double strand break or two single strand breaks.

[1093] In certain embodiments, HDR-mediated sequence alteration is used to alter the sequence of one or more nucleotides in a CCR5 or a CXCR4 gene without using an exogenously provided template nucleic acid. In certain embodiments, alteration of a CCR5 or a CXCR4 target position occurs by HDR with endogenous genomic donor sequence. For example, the endogenous genomic donor sequence provides for alteration of the CCR5 or CXCR4 target position. In certain embodiments, the endogenous genomic donor sequence is located on the same chromosome as the target sequence. In certain embodiments, the endogenous genomic donor sequence is located on a different chromosome from the target sequence. Alteration of a CCR5 or a CXCR4 target position by endogenous genomic donor sequence depends on cleavage by a Cas9 molecule. Cleavage by Cas9 can comprise a double strand break or two single strand breaks.

[1094] In certain embodiments of the methods provided herein, HDR-mediated alteration is used to alter a single nucleotide in a CCR5 or a CXCR4 gene. These embodiments may utilize either one double-strand break or two single-strand breaks. In certain embodiments, a single nucleotide alteration is incorporated using (1) one double-strand break, (2) two single-strand breaks, (3) two double-strand breaks with a break occurring on each side of the target position, (4) one double-strand break and two single strand breaks with the double strand break and two single strand breaks occurring on each side of the target position, (5) four single-strand breaks with a pair of single-strand breaks occurring on each side of the target position, or (6) one single-strand break.

[1095] In certain embodiments, wherein a single-stranded template nucleic acid (e.g., a donor template) is used, the target position can be altered by alternative HDR. In certain embodiments, the donor template encodes an HIV fusion inhibitor. Examples of HIV fusion inhibitors include, but are not limited to, N36, T21, CP621-652, CP628-654, C34, DP107, IZN36, N36ccg, SFT, SC22EK, MTSC22, MTSC21, MTSC19, HP23, HP22, HP23E, T-1249, IQN17, IQN23, IQN36, IIN17, IQ22N17, II22N17, II15N17, IZN17, IZN23, IZN36, C46, C46-EHO, C37H6, and CP32M.

[1096] Donor template-effected alteration of a CCR5 or a CXCR4 target position depends on cleavage by a Cas9 molecule. Cleavage by Cas9 can comprise a nick, a double-strand break, or two single-strand breaks, e.g., one on each strand of the target nucleic acid. After introduction of the breaks on the target nucleic acid, resection occurs at the break ends resulting in single stranded overhanging DNA regions.

[1097] In canonical HDR, a double-stranded donor template is introduced, comprising homologous sequence to the target nucleic acid that can either be directly incorporated into the target nucleic acid or used as a template to change the sequence of the target nucleic acid. After resection at the break, repair can progress by different pathways, e.g., by the double Holliday junction model (or double-strand break repair, DSBR, pathway) or the synthesis-dependent strand annealing (SDSA) pathway. In the double Holliday junction model, strand invasion by the two single stranded overhangs of the target nucleic acid to the homologous sequences in the donor template occurs, resulting in the formation of an intermediate with two Holliday junctions. The junctions migrate as new DNA is synthesized from the ends of the invading strand to fill the gap resulting from the resection. The end of the newly synthesized DNA is ligated to the resected end, and the junctions are resolved, resulting in alteration of the target nucleic acid. Crossover with the donor template may occur upon resolution of the junctions. In the SDSA pathway, only one single stranded overhang invades the donor template and new DNA is synthesized from the end of the invading strand to fill the gap resulting from resection. The newly synthesized DNA then anneals to the remaining single stranded overhang, new DNA is synthesized to fill in the gap, and the strands are ligated to produce the altered DNA duplex.

[1098] In alternative HDR, a single strand donor template, e.g., template nucleic acid, is introduced. A nick, single strand break, or double strand break at the target nucleic acid, for altering a desired target position, is mediated by a Cas9 molecule, e.g., described herein, and resection at the break occurs to reveal single stranded overhangs. Incorporation of the sequence of the template nucleic acid to alter a CCR5 or a CXCR4 target position typically occurs by the SDSA pathway, as described above.

[1099] Additional details on template nucleic acids are provided in Section IV entitled “Template nucleic acids” in International Application PCT/US2014/057905.

[1100] In certain embodiments, double strand cleavage is effected by a Cas9 molecule having cleavage activity associated with an HNH-like domain and cleavage activity associated with a RuvC-like domain, e.g., an N-terminal RuvC-like domain, e.g., a wild-type Cas9. Such embodiments require only a single gRNA.

[1101] In certain embodiments, one single-strand break, or nick, is effected by a Cas9 molecule having nickase activity, e.g., a Cas9 nickase as described herein (such as a D10A Cas9 nickase). A nicked target nucleic acid can be a substrate for alt-HDR.

[1102] In certain embodiments, two single-strand breaks, or nicks, are effected by a Cas9 molecule having nickase activity, e.g., cleavage activity associated with an HNH-like domain or cleavage activity associated with an N-terminal RuvC-like domain. Such embodiments usually require two gRNAs, one for placement of each single-strand break. In certain embodiments, the Cas9 molecule having nickase activity cleaves the strand to which the gRNA hybridizes, but not the strand that is complementary to the strand to which the gRNA hybridizes. In certain embodiments, the Cas9 molecule having nickase activity does not cleave the strand to which the gRNA hybridizes, but rather cleaves the strand that is complementary to the strand to which the gRNA hybridizes.

[1103] In certain embodiments, the nickase has HNH activity, e.g., a Cas9 molecule having the RuvC activity inactivated, e.g., a Cas9 molecule having a mutation at D10, e.g., the D10A mutation (see, e.g., SEQ ID NO:10). D10A inactivates RuvC; therefore, the Cas9 nickase has (only) HNH activity and can cut on the strand to which the gRNA hybridizes (e.g., the complementary strand, which does not have the NGG PAM on it). In certain embodiments, a Cas9 molecule having an H840, e.g., an H840A, mutation can be used as a nickase. H840A inactivates HNH; therefore, the Cas9 nickase has (only) RuvC activity and cuts on the non-complementary strand (e.g., the strand that has the NGG PAM and whose sequence is identical to the gRNA). In certain embodiments, a Cas9 molecule having an N863 mutation, e.g., the N863A mutation, mutation can be used as a nickase. N863A inactivates HNH therefore the Cas9 nickase has (only) RuvC activity and cuts on the non-complementary strand (the strand that has the NGG PAM and whose sequence is identical to the gRNA). In certain embodiments, a Cas9 molecule having an N580 mutation, e.g., the N580A mutation, mutation can be used as a nickase. N580A inactivates HNH therefore the Cas9 nickase has (only) RuvC activity and cuts on the non-complementary strand (the strand that has the NGG PAM and whose sequence is identical to the gRNA).

[1104] In certain embodiments, in which a nickase and two gRNAs are used to position two single strand nicks, one nick is on the+strand and one nick is on the−strand of the target nucleic acid. The PAMs can be outwardly facing. The gRNAs can be selected such that the gRNAs are separated by, from about 0-50, 0-100, or 0-200 nucleotides. In certain embodiments, there is no overlap between the target sequences that are complementary to the targeting domains of the two gRNAs. In certain embodiments, the gRNAs do not overlap and are separated by as much as 50, 100, or 200 nucleotides. In certain embodiments, the use of two gRNAs can increase specificity, e.g., by decreasing off-target binding (Ran 2013).

[1105] In certain embodiments, a single nick can be used to induce HDR, e.g., alt-HDR. It is contemplated herein that a single nick can be used to increase the ratio of HR to NHEJ at a given cleavage site. In certain embodiments, a single strand break is formed in the strand of the target nucleic acid to which the targeting domain of said gRNA is complementary. In certain embodiments, a single strand break is formed in the strand of the target nucleic acid other than the strand to which the targeting domain of said gRNA is complementary.

[1106] 11.4 Placement of Double Strand or Single Strand Breaks Relative to the Target Position

[1107] A double strand break or single strand break in one of the strands should be sufficiently close to a CCR5 or a CXCR4 target position that an alteration is produced in the desired region. In certain embodiments, the distance is not more than 50, 100, 200, 300, 350 or 400 nucleotides. In certain embodiments, the break should be sufficiently close to target position such that the target position is within the region that is subject to exonuclease-mediated removal during end resection. If the distance between the CCR5 or a CXCR4 target position and a break is too great, the sequence desired to be altered may not be included in the end resection and, therefore, may not be altered, as donor sequence, either exogenously provided donor sequence or endogenous genomic donor sequence, in certain embodiments is only used to alter sequence within the end resection region.

[1108] In certain embodiments, the methods described herein introduce one or more breaks near a CCR5 or a CXCR4 target position. In certain of these embodiments, two or more breaks are introduced that flank a CCR5 or a CXCR4 target position. The two or more breaks remove (e.g., delete) a genomic sequence including a CCR5 or a CXCR4 target position. All methods described herein result in altering a CCR5 or a CXCR4 target position within a CCR5 or a CXCR4 gene.

[1109] In certain embodiments, the gRNA targeting domain is configured such that a cleavage event, e.g., a double strand or single strand break, is positioned within 1, 2, 3, 4, 5, 10, 15, 20, 25, 30, 35, 40, 45, 50, 60, 70, 80, 90, 100, 150, or 200 nucleotides of the region desired to be altered, e.g., a mutation. The break, e.g., a double strand or single strand break, can be positioned upstream or downstream of the region desired to be altered, e.g., a mutation. In certain embodiments, a break is positioned within the region desired to be altered, e.g., within a region defined by at least two mutant nucleotides. In certain embodiments, a break is positioned immediately adjacent to the region desired to be altered, e.g., immediately upstream or downstream of a mutation.

[1110] In certain embodiments, a single strand break is accompanied by an additional single strand break, positioned by a second gRNA molecule, as discussed below. For example, the targeting domains bind configured such that a cleavage event, e.g., the two single strand breaks, are positioned within 1, 2, 3, 4, 5, 10, 15, 20, 25, 30, 35, 40, 45, 50, 60, 70, 80, 90, 100, 150, or 200 nucleotides of a target position. In certain embodiments, the first and second gRNA molecules are configured such that, when guiding a Cas9 nickase, a single strand break can be accompanied by an additional single strand break, positioned by a second gRNA, sufficiently close to one another to result in alteration of the desired region. In certain embodiments, the first and second gRNA molecules are configured such that a single strand break positioned by said second gRNA is within 10, 20, 30, 40, or 50 nucleotides of the break positioned by said first gRNA molecule, e.g., when the Cas9 is a nickase. In certain embodiments, the two gRNA molecules are configured to position cuts at the same position, or within a few nucleotides of one another, on different strands, e.g., essentially mimicking a double strand break.

[1111] In certain embodiments in which a gRNA (unimolecular (or chimeric) or modular gRNA) and Cas9 nuclease induce a double strand break for the purpose of inducing HDR-mediated sequence alteration, the cleavage site is between 0-200 bp (e.g., 0 to 175, 0 to 150, 0 to 125, 0 to 100, 0 to 75, 0 to 50, 0 to 25, 25 to 200, 25 to 175, 25 to 150, 25 to 125, 25 to 100, 25 to 75, 25 to 50, 50 to 200, 50 to 175, 50 to 150, 50 to 125, 50 to 100, 50 to 75, 75 to 200, 75 to 175, 75 to 150, 75 to 125, 75 to 100 bp) away from the target position. In certain embodiments, the cleavage site is between 0-100 bp (e.g., 0 to 75, 0 to 50, 0 to 25, 25 to 100, 25 to 75, 25 to 50, 50 to 100, 50 to 75 or 75 to 100 bp) away from the target position.

[1112] In certain embodiments, one can promote HDR by using nickases to generate a break with overhangs. While not wishing to be bound by theory, the single stranded nature of the overhangs can enhance the cell's likelihood of repairing the break by HDR as opposed to, e.g., NHEJ. Specifically, in certain embodiments, HDR is promoted by selecting a first gRNA that targets a first nickase to a first target sequence, and a second gRNA that targets a second nickase to a second target sequence which is on the opposite DNA strand from the first target sequence and offset from the first nick.

[1113] In certain embodiments, the targeting domain of a gRNA molecule is configured to position a cleavage event sufficiently far from a preselected nucleotide that the nucleotide is not altered. In certain embodiments, the targeting domain of a gRNA molecule is configured to position an intronic cleavage event sufficiently far from an intron/exon border, or naturally occurring splice signal, to avoid alteration of the exonic sequence or unwanted splicing events. The gRNA molecule may be a first, second, third and/or fourth gRNA molecule, as described herein.

[1114] 11.5 Placement of a First Break and a Second Break Relative to Each Other

[1115] In certain embodiments, a double strand break can be accompanied by an additional double strand break, positioned by a second gRNA molecule, as is discussed below.

[1116] In certain embodiments, a double strand break can be accompanied by two additional single strand breaks, positioned by a second gRNA molecule and a third gRNA molecule.

[1117] In certain embodiments, a first and second single strand breaks can be accompanied by two additional single strand breaks positioned by a third gRNA molecule and a fourth gRNA molecule.

[1118] When two or more gRNAs are used to position two or more cleavage events, e.g., double strand or single strand breaks, in a target nucleic acid, it is contemplated that the two or more cleavage events may be made by the same or different Cas9 proteins. For example, when two gRNAs are used to position two double stranded breaks, a single Cas9 nuclease may be used to create both double stranded breaks. When two or more gRNAs are used to position two or more single stranded breaks (nicks), a single Cas9 nickase may be used to create the two or more nicks. When two or more gRNAs are used to position at least one double stranded break and at least one single stranded break, two Cas9 proteins may be used, e.g., one Cas9 nuclease and one Cas9 nickase. In certain embodiments, two or more Cas9 proteins are used, and the two or more Cas9 proteins may be delivered sequentially to control specificity of a double stranded versus a single stranded break at the desired position in the target nucleic acid.

[1119] In certain embodiments, the targeting domain of the first gRNA molecule and the targeting domain of the second gRNA molecules are complementary to opposite strands of the target nucleic acid molecule. In certain embodiments, the gRNA molecule and the second gRNA molecule are configured such that the PAMs are oriented outward.

[1120] In certain embodiments, two gRNA are selected to direct Cas9-mediated cleavage at two positions that are a preselected distance from each other. In certain embodiments, the two points of cleavage are on opposite strands of the target nucleic acid. In certain embodiments, the two cleavage points form a blunt ended break, and in other embodiments, they are offset so that the DNA ends comprise one or two overhangs (e.g., one or more 5′ overhangs and/or one or more 3′ overhangs). In certain embodiments, each cleavage event is a nick. In certain embodiments, the nicks are close enough together that they form a break that is recognized by the double stranded break machinery (as opposed to being recognized by, e.g., the SSBr machinery). In certain embodiments, the nicks are far enough apart that they create an overhang that is a substrate for HDR, i.e., the placement of the breaks mimics a DNA substrate that has experienced some resection. For instance, in certain embodiments the nicks are spaced to create an overhang that is a substrate for processive resection. In certain embodiments, the two breaks are spaced within 25-65 nucleotides of each other. The two breaks may be, e.g., about 25, 30, 35, 40, 45, 50, 55, 60, or 65 nucleotides of each other. The two breaks may be, e.g., at least about 25, 30, 35, 40, 45, 50, 55, 60, or 65 nucleotides of each other. The two breaks may be, e.g., at most about 30, 35, 40, 45, 50, 55, 60, or 65 nucleotides of each other. In certain embodiments, the two breaks are about 25-30, 30-35, 35-40, 40-45, 45-50, 50-55, 55-60, or 60-65 nucleotides of each other.

[1121] In certain embodiments, the break that mimics a resected break comprises a 3′ overhang (e.g., generated by a DSB and a nick, where the nick leaves a 3′ overhang), a 5′ overhang (e.g., generated by a DSB and a nick, where the nick leaves a 5′ overhang), a 3′ and a 5′ overhang (e.g., generated by three cuts), two 3′ overhangs (e.g., generated by two nicks that are offset from each other), or two 5′ overhangs (e.g., generated by two nicks that are offset from each other).

[1122] In certain embodiments in which two gRNAs (independently, unimolecular (or chimeric) or modular gRNA) complexing with Cas9 nickases induce two single strand breaks for the purpose of inducing HDR-mediated alteration, the closer nick is between 0-200 bp (e.g., 0 to 175, 0 to 150, 0 to 125, 0 to 100, 0 to 75, 0 to 50, 0 to 25, 25 to 200, 25 to 175, 25 to 150, 25 to 125, 25 to 100, 25 to 75, 25 to 50, 50 to 200, 50 to 175, 50 to 150, 50 to 125, 50 to 100, 50 to 75, 75 to 200, 75 to 175, 75 to 150, 75 to 125, or 75 to 100 bp) away from the target position and the two nicks can ideally be within 25-65 by of each other (e.g., 25 to 50, 25 to 45, 25 to 40, 25 to 35, 25 to 30, 30 to 55, 30 to 50, 30 to 45, 30 to 40, 30 to 35, 35 to 55, 35 to 50, 35 to 45, 35 to 40, 40 to 55, 40 to 50, 40 to 45 bp, 45 to 50 bp, 50 to 55 bp, 55 to 60 bp, or 60 to 65 bp) and no more than 100 bp away from each other (e.g., no more than 90, 80, 70, 60, 50, 40, 30, 20, 10, or 5 bp away from each other). In certain embodiments, the cleavage site is between 0-100 bp (e.g., 0 to 75, 0 to 50, 0 to 25, 25 to 100, 25 to 75, 25 to 50, 50 to 100, 50 to 75, or 75 to 100 bp) away from the target position.

[1123] In certain embodiments, two gRNAs, e.g., independently, unimolecular (or chimeric) or modular gRNA, are configured to position a double-strand break on both sides of a target position. In certain embodiments, three gRNAs, e.g., independently, unimolecular (or chimeric) or modular gRNA, are configured to position a double strand break (i.e., one gRNA complexes with a cas9 nuclease) and two single strand breaks or paired single stranded breaks (i.e., two gRNAs complex with Cas9 nickases) on either side of the target position. In certain embodiments, four gRNAs, e.g., independently, unimolecular (or chimeric) or modular gRNA, are configured to generate two pairs of single stranded breaks (i.e., two pairs of two gRNAs complex with Cas9 nickases) on either side of the target position. The double strand break(s) or the closer of the two single strand nicks in a pair can ideally be within 0-500 bp of the target position (e.g., no more than 450, 400, 350, 300, 250, 200, 150, 100, 50 or 25 bp from the target position). When nickases are used, the two nicks in a pair are, in certain embodiments, within 25-65 bp of each other (e.g., between 25 to 55, 25 to 50, 25 to 45, 25 to 40, 25 to 35, 25 to 30, 50 to 55, 45 to 55, 40 to 55, 35 to 55, 30 to 55, 30 to 50, 35 to 50, 40 to 50, 45 to 50, 35 to 45, 40 to 45 bp, 45 to 50 bp, 50 to 55 bp, 55 to 60 bp, or 60 to 65 bp) and no more than 100 bp away from each other (e.g., no more than 90, 80, 70, 60, 50, 40, 30, or 20 or 10 bp).

[1124] When two gRNAs are used to target Cas9 molecules to breaks, different combinations of Cas9 molecules are envisioned. In certain embodiments, a first gRNA is used to target a first Cas9 molecule to a first target position, and a second gRNA is used to target a second Cas9 molecule to a second target position. In certain embodiments, the first Cas9 molecule creates a nick on the first strand of the target nucleic acid, and the second Cas9 molecule creates a nick on the opposite strand, resulting in a double stranded break (e.g., a blunt ended cut or a cut with overhangs).

[1125] Different combinations of nickases can be chosen to target one single stranded break to one strand and a second single stranded break to the opposite strand. When choosing a combination, one can take into account that there are nickases having one active RuvC-like domain, and nickases having one active HNH domain. In certain embodiments, a RuvC-like domain cleaves the non-complementary strand of the target nucleic acid molecule. In certain embodiments, an HNH-like domain cleaves a single stranded complementary domain, e.g., a complementary strand of a double stranded nucleic acid molecule. Generally, if both Cas9 molecules have the same active domain (e.g., both have an active RuvC domain or both have an active HNH domain), one can choose two gRNAs that bind to opposite strands of the target. In more detail, in certain embodiments a first gRNA is complementary with a first strand of the target nucleic acid and binds a nickase having an active RuvC-like domain and causes that nickase to cleave the strand that is non-complementary to that first gRNA, i.e., a second strand of the target nucleic acid; and a second gRNA is complementary with a second strand of the target nucleic acid and binds a nickase having an active RuvC-like domain and causes that nickase to cleave the strand that is non-complementary to that second gRNA, i.e., the first strand of the target nucleic acid. Conversely, in certain embodiments, a first gRNA is complementary with a first strand of the target nucleic acid and binds a nickase having an active HNH domain and causes that nickase to cleave the strand that is complementary to that first gRNA, i.e., a first strand of the target nucleic acid; and a second gRNA is complementary with a second strand of the target nucleic acid and binds a nickase having an active HNH domain and causes that nickase to cleave the strand that is complementary to that second gRNA, i.e., the second strand of the target nucleic acid. In another arrangement, if one Cas9 molecule has an active RuvC-like domain and the other Cas9 molecule has an active HNH domain, the gRNAs for both Cas9 molecules can be complementary to the same strand of the target nucleic acid, so that the Cas9 molecule with the active RuvC-like domain can cleave the non-complementary strand and the Cas9 molecule with the HNH domain can cleave the complementary strand, resulting in a double stranded break.

[1126] 11.6 Homology Arms of the Donor Template

[1127] A homology arm should extend at least as far as the region in which end resection may occur, e.g., in order to allow the resected single stranded overhang to find a complementary region within the donor template. The overall length could be limited by parameters such as plasmid size or viral packaging limits. In certain embodiments, a homology arm does not extend into repeated elements, e.g., Alu repeats or LINE repeats.

[1128] Exemplary homology arm lengths include at least 50, 100, 250, 500, 750, 1000, 2000, 3000, 4000, or 5000 nucleotides. In certain embodiments, the homology arm length is 50-100, 100-250, 250-500, 500-750, 750-1000, 1000-2000, 2000-3000, 3000-4000, or 4000-5000 nucleotides.

[1129] A template nucleic acid, as that term is used herein, refers to a nucleic acid sequence which can be used in conjunction with a Cas9 molecule and a gRNA molecule to alter the structure of a CCR5 or a CXCR4 target position. In certain embodiments, the CCR5 or CXCR4 target position can be a site between two nucleotides, e.g., adjacent nucleotides, on the target nucleic acid into which one or more nucleotides is added. Alternatively, the CCR5 or CXCR4 target position may comprise one or more nucleotides that are altered by a template nucleic acid.

[1130] In certain embodiments, the target nucleic acid is modified to have some or all of the sequence of the template nucleic acid, typically at or near cleavage site(s). In certain embodiments, the template nucleic acid is single stranded. In certain embodiments, the template nucleic acid is double stranded. In certain embodiments, the template nucleic acid is DNA, e.g., double stranded DNA. In certain embodiments, the template nucleic acid is single stranded DNA. In certain embodiments, the template nucleic acid is encoded on the same vector backbone, e.g. AAV genome, plasmid DNA, as the Cas9 and gRNA. In certain embodiments, the template nucleic acid is excised from a vector backbone in vivo, e.g., it is flanked by gRNA recognition sequences. In certain embodiments, the template nucleic acid comprises endogenous genomic sequence.

[1131] In certain embodiments, the template nucleic acid alters the structure of the target position by participating in an HDR event. In certain embodiments, the template nucleic acid alters the sequence of the target position. In certain embodiments, the template nucleic acid results in the incorporation of a modified, or non-naturally occurring base into the target nucleic acid.

[1132] Typically, the template sequence undergoes a breakage mediated or catalyzed recombination with the target sequence. In certain embodiments, the template nucleic acid includes sequence that corresponds to a site on the target sequence that is cleaved by an eaCas9 mediated cleavage event. In certain embodiments, the template nucleic acid includes sequence that corresponds to both a first site on the target sequence that is cleaved in a first Cas9 mediated event, and a second site on the target sequence that is cleaved in a second Cas9 mediated event.

[1133] A template nucleic acid typically comprises the following components:

[1134] [5′ homology arm]-[replacement sequence]-[3′ homology arm].

[1135] The homology arms provide for recombination into the chromosome, thus replacing the undesired element, e.g., a mutation or signature, with the replacement sequence. In certain embodiments, the homology arms flank the most distal cleavage sites.

[1136] In certain embodiments, the 3′ end of the 5′ homology arm is the position next to the 5′ end of the replacement sequence. In certain embodiments, the 5′ homology arm can extend at least 10, 20, 30, 40, 50, 100, 200, 300, 400, 500, 600, 700, 800, 900, 1000, 1500, 2000, 3000, 4000, or 5000 nucleotides 5′ from the 5′ end of the replacement sequence.

[1137] In certain embodiments, the 5′ end of the 3′ homology arm is the position next to the 3′ end of the replacement sequence. In certain embodiments, the 3′ homology arm can extend at least 10, 20, 30, 40, 50, 100, 200, 300, 400, 500, 600, 700, 800, 900, 1000, 1500, 2000, 3000, 4000, or 5000 nucleotides 3′ from the 3′ end of the replacement sequence.

[1138] In certain embodiments, to alter one or more nucleotides at a CCR5 or a CXCR4 target position, the homology arms, e.g., the 5′ and 3′ homology arms, may each comprise about 1000 bp of sequence flanking the most distal gRNAs (e.g., 1000 bp of sequence on either side of the CCR5 or CXCR4 target position).

[1139] In certain embodiments, one or both homology arms may be shortened to avoid including certain sequence repeat elements, e.g., Alu repeats or LINE elements. For example, a 5′ homology arm may be shortened to avoid a sequence repeat element. In certain embodiments, a 3′ homology arm may be shortened to avoid a sequence repeat element. In certain embodiments, both the 5′ and the 3′ homology arms may be shortened to avoid including certain sequence repeat elements.

[1140] In certain embodiments, template nucleic acids for altering the sequence of a CCR5 or a CXCR4 target position may be designed for use as a single-stranded oligonucleotide, e.g., a single-stranded oligodeoxynucleotide (ssODN). When using a ssODN, 5′ and 3′ homology arms may range up to about 200 bp in length, e.g., at least 25, 50, 75, 100, 125, 150, 175, or 200 bp in length. Longer homology arms are also contemplated for ssODNs as improvements in oligonucleotide synthesis continue to be made. In certain embodiments, a longer homology arm is made by a method other than chemical synthesis, e.g., by denaturing a long double stranded nucleic acid and purifying one of the strands, e.g., by affinity for a strand-specific sequence anchored to a solid substrate.

[1141] In certain embodiments, alt-HDR proceeds more efficiently when the template nucleic acid has extended homology 5′ to the nick (i.e., in the 5′ direction of the nicked strand). Accordingly, in certain embodiments, the template nucleic acid has a longer homology arm and a shorter homology arm, wherein the longer homology arm can anneal 5′ of the nick. In certain embodiments, the arm that can anneal 5′ to the nick is at least 25, 50, 75, 100, 125, 150, 175, or 200, 300, 400, 500, 600, 700, 800, 900, 1000, 1500, 2000, 3000, 4000, or 5000 nucleotides from the nick or the 5′ or 3′ end of the replacement sequence. In certain embodiments, the arm that can anneal 5′ to the nick is at least about 10%, about 20%, about 30%, about 40%, or about 50% longer than the arm that can anneal 3′ to the nick. In certain embodiments, the arm that can anneal 5′ to the nick is at least 2×, 3×, 4×, or 5× longer than the arm that can anneal 3′ to the nick. Depending on whether a ssDNA template can anneal to the intact strand or the nicked strand, the homology arm that anneals 5′ to the nick may be at the 5′ end of the ssDNA template or the 3′ end of the ssDNA template, respectively.

[1142] Similarly, in certain embodiments, the template nucleic acid has a 5′ homology arm, a replacement sequence, and a 3′ homology arm, such that the template nucleic acid has extended homology to the 5′ of the nick. For example, the 5′ homology arm and 3′ homology arm may be substantially the same length, but the replacement sequence may extend farther 5′ of the nick than 3′ of the nick. In certain embodiments, the replacement sequence extends at least about 10%, about 20%, about 30%, about 40%, about 50%, 2x, 3x, 4x, or 5x further to the 5′ end of the nick than the 3′ end of the nick.

[1143] In certain embodiments, alt-HDR proceeds more efficiently when the template nucleic acid is centered on the nick. Accordingly, in certain embodiments, the template nucleic acid has two homology arms that are essentially the same size. For instance, the first homology arm of a template nucleic acid may have a length that is within about 10%, about 9%, about 8%, about 7%, about 6%, about 5%, about 4%, about 3%, about 2%, or about 1% of the second homology arm of the template nucleic acid.

[1144] Similarly, in certain embodiments, the template nucleic acid has a 5′ homology arm, a replacement sequence, and a 3′ homology arm, such that the template nucleic acid extends substantially the same distance on either side of the nick. For example, the homology arms may have different lengths, but the replacement sequence may be selected to compensate for this. For example, the replacement sequence may extend further 5′ from the nick than it does 3′ of the nick, but the homology arm 5′ of the nick is shorter than the homology arm 3′ of the nick, to compensate. The converse is also possible, e.g., that the replacement sequence may extend further 3′ from the nick than it does 5′ of the nick, but the homology arm 3′ of the nick is shorter than the homology arm 5′ of the nick, to compensate.

[1145] 11.7 Template Nucleic Acids

[1146] In certain embodiments, the template nucleic acid is double stranded. In certain embodiments, the template nucleic acid is single stranded. In certain embodiments, the template nucleic acid comprises a single stranded portion and a double stranded portion. In certain embodiments, the template nucleic acid comprises about 50 to 100 bp, e.g., 55 to 95, 60 to 90, 65 to 85, or 70 to 80 bp, homology on either side of the nick and/or replacement sequence. In certain embodiments, the template nucleic acid comprises about 50, 55, 60, 65, 70, 75, 80, 85, 90, 95, or 100 bp homology 5′ of the nick or replacement sequence, 3′ of the nick or replacement sequence, or both 5′ and 3′ of the nick or replacement sequences.

[1147] In certain embodiments, the template nucleic acid comprises about 150 to 200 bp, e.g., 155 to 195, 160 to 190, 165 to 185, or 170 to 180 bp, homology 3′ of the nick and/or replacement sequence. In certain embodiments, the template nucleic acid comprises about 150, 155, 160, 165, 170, 175, 180, 185, 190, 195, or 200 bp homology 3′ of the nick or replacement sequence. In certain embodiments, the template nucleic acid comprises less than about 100, 90, 80, 70, 60, 50, 40, 30, 20, 15, or 10 bp homology 5′ of the nick or replacement sequence.

[1148] In certain embodiment, the template nucleic acid comprises about 150 to 200 bp, e.g., 155 to 195, 160 to 190, 165 to 185, or 170 to 180 bp, homology 5′ of the nick and/or replacement sequence. In certain embodiment, the template nucleic acid comprises about 150, 155, 160, 165, 170, 175, 180, 185, 190, 195, or 200 bp homology 5′ of the nick or replacement sequence. In certain embodiments, the template nucleic acid comprises less than about 100, 90, 80, 70, 60, 50, 40, 30, 20, 15, or 10 bp homology 3′ of the nick or replacement sequence.

[1149] In certain embodiments, the template nucleic acid comprises a nucleotide sequence, e.g., of one or more nucleotides, that can be added to or can template a change in the target nucleic acid. In other embodiments, the template nucleic acid comprises a nucleotide sequence that may be used to modify the target position.

[1150] The template nucleic acid may comprise a replacement sequence. In certain embodiments, the template nucleic acid comprises a 5′ homology arm. In certain embodiments, the template nucleic acid comprises a 3′ homology arm.

[1151] In certain embodiments, the template nucleic acid is linear double stranded DNA. The length may be, e.g., about 150-200 bp, e.g., about 150, 160, 170, 180, 190, or 200 bp. The length may be, e.g., at least 150, 160, 170, 180, 190, or 200 bp. In certain embodiments, the length is no greater than 150, 160, 170, 180, 190, or 200 bp. In certain embodiments, a double stranded template nucleic acid has a length of about 160 bp, e.g., about 155-165, 150-170, 140-180, 130-190, 120-200, 110-210, 100-220, 90-230, or 80-240 bp.

[1152] The template nucleic acid can be linear single stranded DNA. In certain embodiments, the template nucleic acid is (i) linear single stranded DNA that can anneal to the nicked strand of the target nucleic acid, (ii) linear single stranded DNA that can anneal to the intact strand of the target nucleic acid, (iii) linear single stranded DNA that can anneal to the plus strand of the target nucleic acid, (iv) linear single stranded DNA that can anneal to the minus strand of the target nucleic acid, or more than one of the preceding. The length may be, e.g., about 150-200 nucleotides, e.g., about 150, 160, 170, 180, 190, or 200 nucleotides. The length may be, e.g., at least 150, 160, 170, 180, 190, or 200 nucleotides. In certain embodiments, the length is no greater than 150, 160, 170, 180, 190, or 200 nucleotides. In certain embodiments, a single stranded template nucleic acid has a length of about 160 nucleotides, e.g., about 155-165, 150-170, 140-180, 130-190, 120-200, 110-210, 100-220, 90-230, or 80-240 nucleotides.

[1153] In certain embodiments, the template nucleic acid is circular double stranded DNA, e.g., a plasmid. In certain embodiments, the template nucleic acid comprises about 500 to 1000 bp of homology on either side of the replacement sequence and/or the nick. In certain embodiments, the template nucleic acid comprises about 300, 400, 500, 600, 700, 800, 900, 1000, 1500, or 2000 bp of homology 5′ of the nick or replacement sequence, 3′ of the nick or replacement sequence, or both 5′ and 3′ of the nick or replacement sequence. In certain embodiments, the template nucleic acid comprises at least 300, 400, 500, 600, 700, 800, 900, 1000, 1500, or 2000 bp of homology 5′ of the nick or replacement sequence, 3′ of the nick or replacement sequence, or both 5′ and 3′ of the nick or replacement sequence. In certain embodiments, the template nucleic acid comprises no more than 300, 400, 500, 600, 700, 800, 900, 1000, 1500, or 2000 bp of homology 5′ of the nick or replacement sequence, 3′ of the nick or replacement sequence, or both 5′ and 3′ of the nick or replacement sequence.

[1154] In certain embodiments, one or both homology arms may be shortened to avoid including certain sequence repeat elements, e.g., Alu repeats, LINE elements. For example, a 5′ homology arm may be shortened to avoid a sequence repeat element, while a 3′ homology arm may be shortened to avoid a sequence repeat element. In certain embodiments, both the 5′ and the 3′ homology arms may be shortened to avoid including certain sequence repeat elements.

[1155] In certain embodiments, the template nucleic acid is an adenovirus vector, e.g., an AAV vector, e.g., a ssDNA molecule of a length and sequence that allows it to be packaged in an AAV capsid. The vector may be, e.g., less than 5 kb and may contain an ITR sequence that promotes packaging into the capsid. The vector may be integration-deficient. In certain embodiments, the template nucleic acid comprises about 150 to 1000 nucleotides of homology on either side of the replacement sequence and/or the nick. In certain embodiments, the template nucleic acid comprises about 100, 150, 200, 300, 400, 500, 600, 700, 800, 900, 1000, 1500, or 2000 nucleotides 5′ of the nick or replacement sequence, 3′ of the nick or replacement sequence, or both 5′ and 3′ of the nick or replacement sequence. In certain embodiments, the template nucleic acid comprises at least 100, 150, 200, 300, 400, 500, 600, 700, 800, 900, 1000, 1500, or 2000 nucleotides 5′ of the nick or replacement sequence, 3′ of the nick or replacement sequence, or both 5′ and 3′ of the nick or replacement sequence. In certain embodiments, the template nucleic acid comprises at most 100, 150, 200, 300, 400, 500, 600, 700, 800, 900, 1000, 1500, or 2000 nucleotides 5′ of the nick or replacement sequence, 3′ of the nick or replacement sequence, or both 5′ and 3′ of the nick or replacement sequence.

[1156] In certain embodiments, the template nucleic acid is a lentiviral vector, e.g., an IDLV (integration deficiency lentivirus). In certain embodiments, the template nucleic acid comprises about 500 to 1000 bp of homology on either side of the replacement sequence and/or the nick. In certain embodiments, the template nucleic acid comprises about 300, 400, 500, 600, 700, 800, 900, 1000, 1500, or 2000 bp of homology 5′ of the nick or replacement sequence, 3′ of the nick or replacement sequence, or both 5′ and 3′ of the nick or replacement sequence. In certain embodiments, the template nucleic acid comprises at least 300, 400, 500, 600, 700, 800, 900, 1000, 1500, or 2000 bp of homology 5′ of the nick or replacement sequence, 3′ of the nick or replacement sequence, or both 5′ and 3′ of the nick or replacement sequence. In certain embodiments, the template nucleic acid comprises no more than 300, 400, 500, 600, 700, 800, 900, 1000, 1500, or 2000 bp of homology 5′ of the nick or replacement sequence, 3′ of the nick or replacement sequence, or both 5′ and 3′ of the nick or replacement sequence.

[1157] In certain embodiments, the template nucleic acid comprises one or more mutations, e.g., silent mutations, that prevent Cas9 from recognizing and cleaving the template nucleic acid. The template nucleic acid may comprise, e.g., at least 1, 2, 3, 4, 5, 10, 20, or 30 silent mutations relative to the corresponding sequence in the genome of the cell to be altered. In certain embodiments, the template nucleic acid comprises at most 2, 3, 4, 5, 10, 20, 30, or 50 silent mutations relative to the corresponding sequence in the genome of the cell to be altered. In certain embodiments, the cDNA comprises one or more mutations, e.g., silent mutations that prevent Cas9 from recognizing and cleaving the template nucleic acid. The template nucleic acid may comprise, e.g., at least 1, 2, 3, 4, 5, 10, 20, or 30 silent mutations relative to the corresponding sequence in the genome of the cell to be altered. In certain embodiments, the template nucleic acid comprises at most 2, 3, 4, 5, 10, 20, 30, or 50 silent mutations relative to the corresponding sequence in the genome of the cell to be altered.

[1158] In certain embodiments, the 5′ and 3′ homology arms each comprise a length of sequence flanking the nucleotides corresponding to the replacement sequence. In certain embodiments, a template nucleic acid comprises a replacement sequence flanked by a 5′ homology arm and a 3′ homology arm each independently comprising 10 or more, 20 or more, 50 or more, 100 or more, 150 or more, 200 or more, 250 or more, 300 or more, 350 or more, 400 or more, 450 or more, 500 or more, 550 or more, 600 or more, 650 or more, 700 or more, 750 or more, 800 or more, 850 or more, 900 or more, 1000 or more, 1100 or more, 1200 or more, 1300 or more, 1400 or more, 1500 or more, 1600 or more, 1700 or more, 1800 or more, 1900 or more, or 2000 or more nucleotides. In certain embodiments, a template nucleic acid comprises a replacement sequence flanked by a 5′ homology arm and a 3′ homology arm each independently comprising at least 50, 100, or 150 nucleotides, but not long enough to include a repeated element. In certain embodiments, a template nucleic acid comprises a replacement sequence flanked by a 5′ homology arm and a 3′ homology arm each independently comprising 5 to 100, 10 to 150, or 20 to 150 nucleotides. In certain embodiments, the replacement sequence optionally comprises a promoter and/or polyA signal.

[1159] 11.8 Single-Strand Annealing

[1160] Single strand annealing (SSA) is another DNA repair process that repairs a double-strand break between two repeat sequences present in a target nucleic acid. Repeat sequences utilized by the SSA pathway are generally greater than 30 nucleotides in length. Resection at the break ends occurs to reveal repeat sequences on both strands of the target nucleic acid. After resection, single strand overhangs containing the repeat sequences are coated with RPA protein to prevent the repeats sequences from inappropriate annealing, e.g., to themselves. RAD52 binds to and each of the repeat sequences on the overhangs and aligns the sequences to enable the annealing of the complementary repeat sequences. After annealing, the single-strand flaps of the overhangs are cleaved. New DNA synthesis fills in any gaps, and ligation restores the DNA duplex. As a result of the processing, the DNA sequence between the two repeats is deleted. The length of the deletion can depend on many factors including the location of the two repeats utilized, and the pathway or processivity of the resection.

[1161] In contrast to HDR pathways, SSA does not require a template nucleic acid to alter a target nucleic acid sequence. Instead, the complementary repeat sequence is utilized.

[1162] 11.9 Other DNA Repair Pathways

[1163] 11.9.1 SSBR (Single Strand Break Repair)

[1164] Single-stranded breaks (SSB) in the genome are repaired by the SSBR pathway, which is a distinct mechanism from the DSB repair mechanisms discussed above. The SSBR pathway has four major stages: SSB detection, DNA end processing, DNA gap filling, and DNA ligation. A more detailed explanation is given in Caldecott 2008, and a summary is given here.

[1165] In the first stage, when a SSB forms, PARP1 and/or PARP2 recognize the break and recruit repair machinery. The binding and activity of PARP1 at DNA breaks is transient and it seems to accelerate SSBr by promoting the focal accumulation or stability of SSBr protein complexes at the lesion. Arguably the most important of these SSBr proteins is XRCC1, which functions as a molecular scaffold that interacts with, stabilizes, and stimulates multiple enzymatic components of the SSBr process including the protein responsible for cleaning the DNA 3′ and 5′ ends. For instance, XRCC1 interacts with several proteins (DNA polymerase beta, PNK, and three nucleases, APE1, APTX, and APLF) that promote end processing. APE1 has endonuclease activity. APLF exhibits endonuclease and 3′ to 5′ exonuclease activities. APTX has endonuclease and 3′ to 5′ exonuclease activity.

[1166] This end processing is an important stage of SSBR since the 3′- and/or 5′-termini of most, if not all, SSBs are ‘damaged.’ End processing generally involves restoring a damaged 3′-end to a hydroxylated state and and/or a damaged 5′ end to a phosphate moiety, so that the ends become ligation-competent. Enzymes that can process damaged 3′ termini include PNKP, APE1, and TDP1. Enzymes that can process damaged 5′ termini include PNKP, DNA polymerase beta, and APTX. LIG3 (DNA ligase III) can also participate in end processing. Once the ends are cleaned, gap filling can occur.

[1167] At the DNA gap filling stage, the proteins typically present are PARP1, DNA polymerase beta, XRCC1, FEN1 (flap endonuclease 1), DNA polymerase delta/epsilon, PCNA, and LIG1. There are two ways of gap filling, the short patch repair and the long patch repair. Short patch repair involves the insertion of a single nucleotide that is missing. At some SSBs, “gap filling” might continue displacing two or more nucleotides (displacement of up to 12 bases have been reported). FEN1 is an endonuclease that removes the displaced 5′-residues. Multiple DNA polymerases, including Polβ, are involved in the repair of SSBs, with the choice of DNA polymerase influenced by the source and type of SSB.

[1168] In the fourth stage, a DNA ligase such as LIG1 (Ligase I) or LIG3 (Ligase III) catalyzes joining of the ends. Short patch repair uses Ligase III and long patch repair uses Ligase I.

[1169] Sometimes, SSBR is replication-coupled. This pathway can involve one or more of CtIP, MRN, ERCC1, and FEN1. Additional factors that may promote SSBR include: aPARP, PARP1, PARP2, PARG, XRCC1, DNA polymerase b, DNA polymerase d, DNA polymerase e, PCNA, LIG1, PNK, PNKP, APE1, APTX, APLF, TDP1, LIG3, FEN1, CtIP, MRN, and ERCC1.

[1170] 9.9.2 MMR (Mismatch Repair)

[1171] Cells contain three excision repair pathways: MMR, BER, and NER. The excision repair pathways have a common feature in that they typically recognize a lesion on one strand of the DNA, then exo/endonucleases remove the lesion and leave a 1-30 nucleotide gap that is sub-sequentially filled in by DNA polymerase and finally sealed with ligase. A more complete picture is given in Li, Cell Research (2008) 18:85-98, and a summary is provided here.

[1172] Mismatch repair (MMR) operates on mispaired DNA bases.

[1173] The MSH2/6 or MSH2/3 complexes both have ATPases activity that plays an important role in mismatch recognition and the initiation of repair. MSH2/6 preferentially recognizes base-base mismatches and identifies mispairs of 1 or 2 nucleotides, while MSH2/3 preferentially recognizes larger ID mispairs.

[1174] hMLH1 heterodimerizes with hPMS2 to form hMutLa which possesses an ATPase activity and is important for multiple steps of MMR. It possesses a PCNA/replication factor C (RFC)-dependent endonuclease activity which plays an important role in 3′ nick-directed MMR involving EXO1. (EXO1 is a participant in both HR and MMR.) It regulates termination of mismatch-provoked excision. Ligase I is the relevant ligase for this pathway. Additional factors that may promote MMR include: EXO1, MSH2, MSH3, MSH6, MLH1, PMS2, MLH3, DNA Pol d, RPA, HMGB1, RFC, and DNA ligase I.

[1175] 11.9.3 Base Excision Repair (BER)

[1176] The base excision repair (BER) pathway is active throughout the cell cycle; it is responsible primarily for removing small, non-helix-distorting base lesions from the genome. In contrast, the related Nucleotide Excision Repair pathway (discussed in the next section) repairs bulky helix-distorting lesions. A more detailed explanation is given in Caldecott, Nature Reviews Genetics 9, 619-631 (August 2008), and a summary is given here.

[1177] Upon DNA base damage, base excision repair (BER) is initiated and the process can be simplified into five major steps: (a) removal of the damaged DNA base; (b) incision of the subsequent a basic site; (c) clean-up of the DNA ends; (d) insertion of the desired nucleotide into the repair gap; and (e) ligation of the remaining nick in the DNA backbone. These last steps are similar to the SSBR.

[1178] In the first step, a damage-specific DNA glycosylase excises the damaged base through cleavage of the N-glycosidic bond linking the base to the sugar phosphate backbone. Then AP endonuclease-1 (APE1) or bifunctional DNA glycosylases with an associated lyase activity incised the phosphodiester backbone to create a DNA single strand break (SSB). The third step of BER involves cleaning-up of the DNA ends. The fourth step in BER is conducted by Polβ that adds a new complementary nucleotide into the repair gap and in the final step XRCC1/Ligase III seals the remaining nick in the DNA backbone. This completes the short-patch BER pathway in which the majority (˜80%) of damaged DNA bases are repaired. However, if the 5′ ends in step 3 are resistant to end processing activity, following one nucleotide insertion by Pol β there is then a polymerase switch to the replicative DNA polymerases, Pol δ/ε, which then add ˜2-8 more nucleotides into the DNA repair gap. This creates a 5′ flap structure, which is recognized and excised by flap endonuclease-1 (FEN-1) in association with the processivity factor proliferating cell nuclear antigen (PCNA). DNA ligase I then seals the remaining nick in the DNA backbone and completes long-patch BER. Additional factors that may promote the BER pathway include: DNA glycosylase, APE1, Polb, Pold, Pole, XRCC1, Ligase III, FEN-1, PCNA, RECQL4, WRN, MYH, PNKP, and APTX.

[1179] 11.9.4 Nucleotide Excision Repair (NER)

[1180] Nucleotide excision repair (NER) is an important excision mechanism that removes bulky helix-distorting lesions from DNA. Additional details about NER are given in Marteijn et al., Nature Reviews Molecular Cell Biology 15, 465-481 (2014), and a summary is given here. NER a broad pathway encompassing two smaller pathways: global genomic NER (GG-NER) and transcription coupled repair NER (TC-NER). GG-NER and TC-NER use different factors for recognizing DNA damage. However, they utilize the same machinery for lesion incision, repair, and ligation.

[1181] Once damage is recognized, the cell removes a short single-stranded DNA segment that contains the lesion. Endonucleases XPF/ERCC1 and XPG (encoded by ERCC5) remove the lesion by cutting the damaged strand on either side of the lesion, resulting in a single-strand gap of 22-30 nucleotides. Next, the cell performs DNA gap filling synthesis and ligation. Involved in this process are: PCNA, RFC, DNA Pol δ, DNA Pol ε or DNA Pol κ, and DNA ligase I or XRCC1/Ligase III. Replicating cells tend to use DNA pol ε and DNA ligase I, while non-replicating cells tend to use DNA Pol δ, DNA Pol κ, and the XRCC1/Ligase III complex to perform the ligation step.

[1182] NER can involve the following factors: XPA-G, POLH, XPF, ERCC1, XPA-G, and LIG1. Transcription-coupled NER (TC-NER) can involve the following factors: CSA, CSB, XPB, XPD, XPG, ERCC1, and TTDA. Additional factors that may promote the NER repair pathway include XPA-G, POLH, XPF, ERCC1, XPA-G, LIG1, CSA, CSB, XPA, XPB, XPC, XPD, XPF, XPG, TTDA, UVSSA, USP7, CETN2, RAD23B, UV-DDB, CAK subcomplex, RPA, and PCNA.

[1183] 11.9.5 Interstrand Crosslink (ICL)

[1184] A dedicated pathway called the ICL repair pathway repairs interstrand crosslinks. Interstrand crosslinks, or covalent crosslinks between bases in different DNA strand, can occur during replication or transcription. ICL repair involves the coordination of multiple repair processes, in particular, nucleolytic activity, translesion synthesis (TLS), and HDR. Nucleases are recruited to excise the ICL on either side of the crosslinked bases, while TLS and HDR are coordinated to repair the cut strands. ICL repair can involve the following factors: endonucleases, e.g., XPF and RAD51C, endonucleases such as RAD51, translesion polymerases, e.g., DNA polymerase zeta and Rev1), and the Fanconi anemia (FA) proteins, e.g., FancJ.

[1185] 11.9.6 Other Pathways

[1186] Several other DNA repair pathways exist in mammals.

[1187] Translesion synthesis (TLS) is a pathway for repairing a single stranded break left after a defective replication event and involves translesion polymerases, e.g., DNA polβ and Rev1.

[1188] Error-free postreplication repair (PRR) is another pathway for repairing a single stranded break left after a defective replication event.

[1189] 11.10 Targeted Knockdown

[1190] Unlike CRISPR/Cas-mediated gene knockout, which permanently eliminates expression by mutating the gene (e.g., a CCR5 or CXCR4 gene) at the DNA level, CRISPR/Cas knockdown allows for temporary reduction of gene expression through the use of artificial transcription factors. Mutating key residues in both DNA cleavage domains of the Cas9 protein (e.g. the D10A and H840A mutations) results in the generation of a catalytically inactive Cas9 (eiCas9 which is also known as dead Cas9 or dCas9) molecule. A catalytically inactive Cas9 complexes with a gRNA and localizes to the DNA sequence specified by that gRNA's targeting domain, however, it does not cleave the target DNA. Fusion of the dCas9 to an effector domain, e.g., a transcription repression domain, enables recruitment of the effector to any DNA site specified by the gRNA. Although an enzymatically inactive (eiCas9) Cas9 molecule itself can block transcription when recruited to early regions in the coding sequence, more robust repression can be achieved by fusing a transcriptional repression domain (for example KRAB, SID or ERD) to the Cas9 and recruiting it to the target knockdown position, e.g., within 1000 bp of sequence 3′ of the start codon or within 500 bp of a promoter region 5′ of the start codon of a gene (e.g., a CCR5 or CXCR4 gene). It is likely that targeting DNAseI hypersensitive sites (DHSs) of the promoter may yield more efficient gene repression or activation because these regions are more likely to be accessible to the Cas9 protein and are also more likely to harbor sites for endogenous transcription factors. Especially for gene repression, it is contemplated herein that blocking the binding site of an endogenous transcription factor would aid in downregulating gene expression. In certain embodiments, one or more eiCas9 molecules may be used to block binding of one or more endogenous transcription factors. In certain embodiments, an eiCas9 molecule can be fused to a chromatin modifying protein. Altering chromatin status can result in decreased expression of the target gene. One or more eiCas9 molecules fused to one or more chromatin modifying proteins may be used to alter chromatin status.

[1191] In certain embodiments, a gRNA molecule can be targeted to a known transcription response elements (e.g., promoters, enhancers, etc.), a known upstream activating sequences (UAS), and/or sequences of unknown or known function that are suspected of being able to control expression of the target DNA.

[1192] CRISPR/Cas-mediated gene knockdown can be used to reduce expression of an unwanted allele or transcript. In certain embodiments, permanent destruction of the gene is not ideal. In these embodiments, site-specific repression may be used to temporarily reduce or eliminate expression. In certain embodiments, the off-target effects of a Cas-repressor may be less severe than those of a Cas-nuclease as a nuclease can cleave any DNA sequence and cause mutations whereas a Cas-repressor may only have an effect if it targets the promoter region of an actively transcribed gene. However, while nuclease-mediated knockout is permanent, repression may only persist as long as the Cas-repressor is present in the cells. Once the repressor is no longer present, it is likely that endogenous transcription factors and gene regulatory elements would restore expression to its natural state.

[1193] 11.11 Examples of gRNAs in Genome Editing Methods

[1194] gRNA molecules as described herein can be used with Cas9 molecules that generate a double strand break or a single strand break to alter the sequence of a target nucleic acid, e.g., a target position or target genetic signature. gRNA molecules useful in these methods are described below.

[1195] In certain embodiments, the gRNA, e.g., a chimeric gRNA, is configured such that it comprises one or more of the following properties;

[1196] (a) it can position, e.g., when targeting a Cas9 molecule that makes double strand breaks, a double strand break (i) within 50, 100, 150, 200, 250, 300, 350, 400, 450, or 500 nucleotides of a target position, or (ii) sufficiently close that the target position is within the region of end resection;

[1197] (b) it has a targeting domain of at least 16 nucleotides, e.g., a targeting domain of (i) 16, (ii), 17, (iii) 18, (iv) 19, (v) 20, (vi) 21, (vii) 22, (viii) 23, (ix) 24, (x) 25, or (xi) 26 nucleotides; and

[1198] (c)(i) the proximal and tail domain, when taken together, comprise at least 15, 18, 20, 25, 30, 31, 35, 40, 45, 49, 50, or 53 nucleotides, e.g., at least 15, 18, 20, 25, 30, 31, 35, 40, 45, 49, 50, or 53 nucleotides from a naturally occurring S. pyogenes, S. aureus, or N. meningitidis tail and proximal domain, or a sequence that differs by no more than 1, 2, 3, 4, 5; 6, 7, 8, 9 or 10 nucleotides therefrom;

[1199] (c)(ii) there are at least 15, 18, 20, 25, 30, 31, 35, 40, 45, 49, 50, or 53 nucleotides 3′ to the last nucleotide of the second complementarity domain, e.g., at least 15, 18, 20, 25, 30, 31, 35, 40, 45, 49, 50, or 53 nucleotides from the corresponding sequence of a naturally occurring S. pyogenes, S. aureus, or N meningitidis gRNA, or a sequence that differs by no more than 1, 2, 3, 4, 5; 6, 7, 8, 9 or 10 nucleotides therefrom;

[1200] (c)(iii) there are at least 16, 19, 21, 26, 31, 32, 36, 41, 46, 50, 51, or 54 nucleotides 3′ to the last nucleotide of the second complementarity domain that is complementary to its corresponding nucleotide of the first complementarity domain, e.g., at least 16, 19, 21, 26, 31, 32, 36, 41, 46, 50, 51, or 54 nucleotides from the corresponding sequence of a naturally occurring S. pyogenes, S. aureus, or N meningitidis gRNA, or a sequence that differs by no more than 1, 2, 3, 4, 5; 6, 7, 8, 9 or 10 nucleotides therefrom;

[1201] (c)(iv) the tail domain is at least 10, 15, 20, 25, 30, 35 or 40 nucleotides in length, e.g., it comprises at least 10, 15, 20, 25, 30, 35 or 40 nucleotides from a naturally occurring S. pyogenes, S. aureus, or N meningitidis tail domain, or a sequence that differs by no more than 1, 2, 3, 4, 5; 6, 7, 8, 9 or 10 nucleotides therefrom; or

[1202] (c)(v) the tail domain comprises 15, 20, 25, 30, 35, 40 nucleotides or all of the corresponding portions of a naturally occurring tail domain, e.g., a naturally occurring S. pyogenes, S. aureus, or N. meningitidis tail domain.

[1203] In certain embodiments, the gRNA is configured such that it comprises properties: a and b(i); a and b(ii); a and b(iii); a and b(iv); a and b(v); a and b(vi); a and b(vii); a and b(viii); a and b(ix); a and b(x); a and b(xi); a and c; a, b, and c; a(i), b(i), and c(i); a(i), b(i), and c(ii); a(i), b(ii), and c(i); a(i), b(ii), and c(ii); a(i), b(iii), and c(i); a(i), b(iii), and c(ii); a(i), b(iv), and c(i); a(i), b(iv), and c(ii); a(i), b(v), and c(i); a(i), b(v), and c(ii); a(i), b(vi), and c(i); a(i), b(vi), and c(ii); a(i), b(vii), and c(i); a(i), b(vii), and c(ii); a(i), b(viii), and c(i); a(i), b(viii), and c(ii); a(i), b(ix), and c(i); a(i), b(ix), and c(ii); a(i), b(x), and c(i); a(i), b(x), and c(ii); a(i), b(xi), or c(i); a(i), b(xi), and c(ii).

[1204] In certain embodiments, the gRNA, e.g., a chimeric gRNA, is configured such that it comprises one or more of the following properties;

[1205] (a) one or both of the gRNAs can position, e.g., when targeting a Cas9 molecule that makes single strand breaks, a single strand break within (i) 50, 100, 150, 200, 250, 300, 350, 400, 450, or 500 nucleotides of a target position, or (ii) sufficiently close that the target position is within the region of end resection;

[1206] (b) one or both have a targeting domain of at least 16 nucleotides, e.g., a targeting domain of (i) 16, (ii), 17, (iii) 18, (iv) 19, (v) 20, (vi) 21, (vii) 22, (viii) 23, (ix) 24, (x) 25, or (xi) 26 nucleotides; and

[1207] (c)(i) the proximal and tail domain, when taken together, comprise at least 15, 18, 20, 25, 30, 31, 35, 40, 45, 49, 50, or 53 nucleotides, e.g., at least 15, 18, 20, 25, 30, 31, 35, 40, 45, 49, 50, or 53 nucleotides from a naturally occurring S. pyogenes, S. aureus, or N. meningitidis tail and proximal domain, or a sequence that differs by no more than 1, 2, 3, 4, 5, 6, 7, 8, 9 or 10 nucleotides therefrom;

[1208] (c)(ii) there are at least 15, 18, 20, 25, 30, 31, 35, 40, 45, 49, 50, or 53 nucleotides 3′ to the last nucleotide of the second complementarity domain, e.g., at least 15, 18, 20, 25, 30, 31, 35, 40, 45, 49, 50, or 53 nucleotides from the corresponding sequence of a naturally occurring S. pyogenes, S. aureus, or N. meningitidis gRNA, or a sequence that differs by no more than 1, 2, 3, 4, 5; 6, 7, 8, 9 or 10 nucleotides therefrom;

[1209] (c)(iii) there are at least 16, 19, 21, 26, 31, 32, 36, 41, 46, 50, 51, or 54 nucleotides 3′ to the last nucleotide of the second complementarity domain that is complementary to its corresponding nucleotide of the first complementarity domain, e.g., at least 16, 19, 21, 26, 31, 32, 36, 41, 46, 50, 51, or 54 nucleotides from the corresponding sequence of a naturally occurring S. pyogenes, S. aureus, or N meningitidis gRNA, or a sequence that differs by no more than 1, 2, 3, 4, 5; 6, 7, 8, 9 or 10 nucleotides therefrom;

[1210] (c)(iv) the tail domain is at least 10, 15, 20, 25, 30, 35 or 40 nucleotides in length, e.g., it comprises at least 10, 15, 20, 25, 30, 35 or 40 nucleotides from a naturally occurring S. pyogenes, S. aureus, or N meningitidis tail domain, or a sequence that differs by no more than 1, 2, 3, 4, 5; 6, 7, 8, 9 or 10 nucleotides therefrom; or

[1211] (c)(v) the tail domain comprises 15, 20, 25, 30, 35, 40 nucleotides or all of the corresponding portions of a naturally occurring tail domain, e.g., a naturally occurring S. pyogenes, S. aureus, or N. meningitidis tail domain.

[1212] In certain embodiments, the gRNA is configured such that it comprises properties: a and b(i); a and b(ii); a and b(iii); a and b(iv); a and b(v); a and b(vi); a and b(vii); a and b(viii); a and b(ix); a and b(x); a and b(xi); a and c; a, b, and c; a(i), b(i), and c(i); a(i), b(i), and c(ii); a(i), b(ii), and c(i); a(i), b(ii), and c(ii); a(i), b(iii), and c(i); a(i), b(iii), and c(ii); a(i), b(iv), and c(i); a(i), b(iv), and c(ii); a(i), b(v), and c(i); a(i), b(v), and c(ii); a(i), b(vi), and c(i); a(i), b(vi), and c(ii); a(i), b(vii), and c(i); a(i), b(vii), and c(ii); a(i), b(viii), and c(i); a(i), b(viii), and c(ii); a(i), b(ix), and c(i); a(i), b(ix), and c(ii); a(i), b(x), and c(i); a(i), b(x), and c(ii); a(i), b(xi), and c(i); a(i), b(xi), and c(ii).

[1213] In certain embodiments, the gRNA is used with a Cas9 nickase molecule having HNH activity, e.g., a Cas9 molecule having the RuvC activity inactivated, e.g., a Cas9 molecule having a mutation at D10, e.g., the D10A mutation. In certain embodiments, the gRNA is used with a Cas9 nickase molecule having RuvC activity, e.g., a Cas9 molecule having the HNH activity inactivated, e.g., a Cas9 molecule having a mutation at 840, e.g., the H840A. In certain embodiments, the gRNAs are used with a Cas9 nickase molecule having RuvC activity, e.g., a Cas9 molecule having the HNH activity inactivated, e.g., a Cas9 molecule having a mutation at N863, e.g., the N863A mutation. In certain embodiments, the gRNAs are used with a Cas9 nickase molecule having RuvC activity, e.g., a Cas9 molecule having the HNH activity inactivated, e.g., a Cas9 molecule having a mutation at N580, e.g., the N580A mutation.

[1214] In certain embodiments, a pair of gRNAs, e.g., a pair of chimeric gRNAs, comprising a first and a second gRNA, is configured such that they comprises one or more of the following properties;

[1215] (a) one or both of the gRNAs can position, e.g., when targeting a Cas9 molecule that makes single strand breaks, a single strand break within (i) 50, 100, 150, 200, 250, 300, 350, 400, 450, or 500 nucleotides of a target position, or (ii) sufficiently close that the target position is within the region of end resection;

[1216] (b) one or both have a targeting domain of at least 16 nucleotides, e.g., a targeting domain of (i) 16, (ii), 17, (iii) 18, (iv) 19, (v) 20, (vi) 21, (vii) 22, (viii) 23, (ix) 24, (x) 25, or (xi) 26 nucleotides;

[1217] (c) (i) the proximal and tail domain, when taken together, comprise at least 15, 18, 20, 25, 30, 31, 35, 40, 45, 49, 50, or 53 nucleotides, e.g., at least 15, 18, 20, 25, 30, 31, 35, 40, 45, 49, 50, or 53 nucleotides from a naturally occurring S. pyogenes, S. aureus, or N. meningitidis tail and proximal domain, or a sequence that differs by no more than 1, 2, 3, 4, 5; 6, 7, 8, 9 or 10 nucleotides therefrom;

[1218] (c)(ii) there are at least 15, 18, 20, 25, 30, 31, 35, 40, 45, 49, 50, or 53 nucleotides 3′ to the last nucleotide of the second complementarity domain, e.g., at least 15, 18, 20, 25, 30, 31, 35, 40, 45, 49, 50, or 53 nucleotides from the corresponding sequence of a naturally occurring S. pyogenes, S. aureus, or N meningitidis gRNA, or a sequence that differs by no more than 1, 2, 3, 4, 5; 6, 7, 8, 9 or 10 nucleotides therefrom;

[1219] (c)(iii) there are at least 16, 19, 21, 26, 31, 32, 36, 41, 46, 50, 51, or 54 nucleotides 3′ to the last nucleotide of the second complementarity domain that is complementary to its corresponding nucleotide of the first complementarity domain, e.g., at least 16, 19, 21, 26, 31, 32, 36, 41, 46, 50, 51, or 54 nucleotides from the corresponding sequence of a naturally occurring S. pyogenes, S. aureus, or N meningitidis gRNA, or a sequence that differs by no more than 1, 2, 3, 4, 5; 6, 7, 8, 9 or 10 nucleotides therefrom;

[1220] (c)(iv) the tail domain is at least 10, 15, 20, 25, 30, 35 or 40 nucleotides in length, e.g., it comprises at least 10, 15, 20, 25, 30, 35 or 40 nucleotides from a naturally occurring S. pyogenes, S. aureus, or N meningitidis tail domain; or, or a sequence that differs by no more than 1, 2, 3, 4, 5; 6, 7, 8, 9 or 10 nucleotides therefrom; or

[1221] (c)(v) the tail domain comprises 15, 20, 25, 30, 35, 40 nucleotides or all of the corresponding portions of a naturally occurring tail domain, e.g., a naturally occurring S. pyogenes, S. aureus, or N. meningitidis tail domain;

[1222] (d) the gRNAs are configured such that, when hybridized to target nucleic acid, they are separated by 0-50, 0-100, 0-200, at least 10, at least 20, at least 30 or at least 50 nucleotides;

[1223] (e) the breaks made by the first gRNA and second gRNA are on different strands; and

[1224] (f) the PAMs are facing outwards.

[1225] In certain embodiments, one or both of the gRNAs is configured such that it comprises properties: a and b(i); a and b(ii); a and b(iii); a and b(iv); a and b(v); a and b(vi); a and b(vii); a and b(viii); a and b(ix); a and b(x); a and b(xi); a and c; a, b, and c; a(i), b(i), and c(i); a(i), b(i), and c(ii); a(i), b(i), c, and d; a(i), b(i), c, and e; a(i), b(i), c, d, and e; a(i), b(ii), and c(i); a(i), b(ii), and c(ii); a(i), b(ii), c, and d; a(i), b(ii), c, and e; a(i), b(ii), c, d, and e; a(i), b(iii), and c(i); a(i), b(iii), and c(ii); a(i), b(iii), c, and d; a(i), b(iii), c, and e; a(i), b(iii), c, d, and e; a(i), b(iv), and c(i); a(i), b(iv), and c(ii); a(i), b(iv), c, and d; a(i), b(iv), c, and e; a(i), b(iv), c, d, and e; a(i), b(v), and c(i); a(i), b(v), and c(ii); a(i), b(v), c, and d; a(i), b(v), c, and e; a(i), b(v), c, d, and e; a(i), b(vi), and c(i); a(i), b(vi), and c(ii); a(i), b(vi), c, and d; a(i), b(vi), c, and e; a(i), b(vi), c, d, and e; a(i), b(vii), and c(i); a(i), b(vii), and c(ii); a(i), b(vii), c, and d; a(i), b(vii), c, and e; a(i), b(vii), c, d, and e; a(i), b(viii), and c(i); a(i), b(viii), and c(ii); a(i), b(viii), c, and d; a(i), b(viii), c, and e; a(i), b(viii), c, d, and e; a(i), b(ix), and c(i); a(i), b(ix), and c(ii); a(i), b(ix), c, and d; a(i), b(ix), c, and e; a(i), b(ix), c, d, and e; a(i), b(x), and c(i); a(i), b(x), and c(ii); a(i), b(x), c, and d; a(i), b(x), c, and e; a(i), b(x), c, d, and e; a(i), b(xi), and c(i); a(i), b(xi), and c(ii); a(i), b(xi), c, and d; a(i), b(xi), c, and e; a(i), b(xi), c, d, and e.

[1226] In certain embodiments, the gRNAs are used with a Cas9 nickase molecule having HNH activity, e.g., a Cas9 molecule having the RuvC activity inactivated, e.g., a Cas9 molecule having a mutation at D10, e.g., the D10A mutation. In certain embodiments, the gRNAs are used with a Cas9 nickase molecule having RuvC activity, e.g., a Cas9 molecule having the HNH activity inactivated, e.g., a Cas9 molecule having a mutation at H840, e.g., the H840A mutation. In certain embodiments, the gRNAs are used with a Cas9 nickase molecule having RuvC activity, e.g., a Cas9 molecule having the HNH activity inactivated, e.g., a Cas9 molecule having a mutation at N863, e.g., the N863A mutation. In certain embodiments, the gRNAs are used with a Cas9 nickase molecule having RuvC activity, e.g., a Cas9 molecule having the HNH activity inactivated, e.g., a Cas9 molecule having a mutation at N580, e.g., the N580A mutation.

### 12. Target Cells

[1227] Cas9 molecules and gRNA molecules, e.g., a Cas9 molecule/gRNA molecule complex, can be used to manipulate a cell, e.g., to edit a target nucleic acid, in a wide variety of cells.

[1228] In certain embodiments, a cell is manipulated by altering or editing (e.g., introducing a mutation in) the CCR5 gene, e.g., as described herein. In certain embodiments, the expression of the CCR5 gene is altered or modulated, e.g., in vivo. In certain embodiments, the expression of the CCR5 gene is altered or modulated, e.g., ex vivo.

[1229] In certain embodiments, a cell is manipulated by altering or editing (e.g., introducing a mutation in) the CXCR4 gene, e.g., as described herein. In certain embodiments, the expression of the CXCR4 gene is altered or modulated, e.g., in vivo. In certain embodiments, the expression of the CXCR4 gene is altered or modulated, e.g., ex vivo.

[1230] In certain embodiments, a cell is manipulated by altering or editing (e.g., introducing a mutation in) both the CCR5 and the CXCR4 genes, e.g., as described herein. In certain embodiments, the expression of both the CCR5 and the CXCR4 genes is altered or modulated, e.g., in vivo. In certain embodiments, the expression of both the CCR5 and the CXCR4 genes is altered or modulated, e.g., ex vivo.

[1231] The Cas9 and gRNA molecules described herein can be delivered to a target cell. In certain embodiments, the target cell is a circulating blood cell, e.g., a T cell (e.g., a CD4⁺ T cell, a CD8⁺ T cell, a helper T cell, a regulatory T cell, a cytotoxic T cell, a memory T cell, a T cell precursor or a natural killer T cell), a B cell (e.g., a progenitor B cell, a Pre B cell, a Pro B cell, a memory B cell, a plasma B cell), a monocyte, a megakaryocyte, a neutrophil, an eosinophil, a basophil, a mast cell, a reticulocyte, a lymphoid progenitor cell, a myeloid progenitor cell, a gut-associated lymphoid tissue (GALT) cell, a dendritic cell, a macrophage, a microglial cell,or a hematopoietic stem cell. In certain embodiments, the target cell is a bone marrow cell, (e.g., a lymphoid progenitor cell, a myeloid progenitor cell, an erythroid progenitor cell, a hematopoietic stem cell, or a mesenchymal stem cell). In certain embodiments, the target cell is a CD4⁺ T cell. In certain embodiments, the target cell is a lymphoid progenitor cell (e.g. a common lymphoid progenitor (CLP) cell). In certain embodiments, the target cell is a myeloid progenitor cell (e.g. a common myeloid progenitor (CMP) cell). In certain embodiments, the target cell is a hematopoietic stem cell (e.g. a long term hematopoietic stem cell (LT-HSC), a short term hematopoietic stem cell (ST-HSC), a multipotent progenitor (MPP) cell, a lineage restricted progenitor (LRP) cell).

[1232] In certain embodiments, the target cell is manipulated ex vivo by editing (e.g., introducing a mutation in) the CCR5 gene and/or modulating the expression of the CCR5 gene, and administered to the subject. In certain embodiments, the target cell is manipulated ex vivo by editing (e.g., introducing a mutation in) the CXCR4 gene and/or modulating the expression of the CXCR4 gene, and administered to the subject. In certain embodiments, the target cell is manipulated ex vivo by editing (e.g., introducing a mutation in) both the CCR5 and the CXCR4 gene and/or modulating the expression of the both the CCR5 and the CXCR4 gene, and administered to the subject. Sources of target cells for ex vivo manipulation may include, by way of example, the subject's blood, the subject's cord blood, or the subject's bone marrow. Sources of target cells for ex vivo manipulation may also include, by way of example, heterologous donor blood, cord blood, or bone marrow.

[1233] In certain embodiments, a CD4⁺T cell is removed from the subject, manipulated ex vivo as described above, and the CD4⁺T cell is returned to the subject. In certain embodiments, a lymphoid progenitor cell is removed from the subject, manipulated ex vivo as described above, and the lymphoid progenitor cell is returned to the subject. In certain embodiments, a myeloid progenitor cell is removed from the subject, manipulated ex vivo as described above, and the myeloid progenitor cell is returned to the subject. In certain embodiments, a hematopoietic stem cell is removed from the subject, manipulated ex vivo as described above, and the hematopoietic stem cell is returned to the subject.

[1234] A suitable cell can also include a stem cell such as, by way of example, an embryonic stem cell, an induced pluripotent stem cell, a neuronal stem cell and a mesenchymal stem cell. In certain embodiments, the cell is an induced pluripotent stem cells (iPS) cell or a cell derived from an iPS cell, e.g., an iPS cell generated from the subject, modified as described above and differentiated into a clinically relevant cell such as e.g, a CD4⁺ T cell, a lymphoid progenitor cell, myeloid progenitor cell, a macrophage, dendritic cell, gut associated lymphoid tissue or a hematopoietic stem cell. In certain embodiments, AAV is used to transduce the target cells, e.g., the target cells described herein.

### 13. Delivery, Formulations and Routes of Administration

[1235] The components, e.g., a Cas9 molecule, one or more gRNA molecules (e.g., a Cas9 molecule/gRNA molecule complex), and a donor template nucleic acid, or all three, can be delivered, formulated, or administered in a variety of forms, see, e.g., Tables 6 and 7. In certain embodiments, the Cas9 molecule, one or more gRNA molecules (e.g., two gRNA molecules) are present together in a genome editing system. In certain embodiments, the sequence encoding the Cas9 molecule and the sequence(s) encoding the two or more (e.g., 2, 3, 4, or more) different gRNA molecules are present on the same nucleic acid molecule, e.g., an AAV vector. In certain embodiments, two sequences encoding the Cas9 molecules and the sequences encoding the two or more (e.g., 2, 3, 4, or more) different gRNA molecules are present on the same nucleic acid molecule, e.g., an AAV vector. When a Cas9 or gRNA component is encoded as DNA for delivery, the DNA can typically include a control region, e.g., comprising a promoter, to effect expression. Useful promoters for Cas9 molecule sequences include CMV, EFS, EF-1a, MSCV, PGK, and CAG, the Skeletal Alpha Actin promoter, the Muscle Creatine Kinase promoter, the Dystrophin promoter, the Alpha Myosin Heavy Chain promoter, and the Smooth Muscle Actin promoter. In certain embodiments, the promoter is a constitutive promoter. In certain embodiments, the promoter is a tissue specific promoter. Useful promoters for gRNAs include T7.H1, EF-la, 7SK, U6, U1 and tRNA promoters. Promoters with similar or dissimilar strengths can be selected to tune the expression of components. Sequences encoding a Cas9 molecule can comprise a nuclear localization signal (NLS), e.g., an SV40 NLS. In certain embodiments, the sequence encoding a Cas9 molecule comprise at least two nuclear localization signals. In certain embodiments a promoter for a Cas9 molecule or a gRNA molecule can be, independently, inducible, tissue specific, or cell specific. Table 6 provides examples of how the components can be formulated, delivered, or administered.

TABLE 6
Elements

| | | Donor | |
|---|---|---|---|
| | | Template | |
| Cas9 | gRNA | Nucleic | |
| Molecule(s) | Molecule(s) | Acid | Comments |
| DNA | DNA | DNA | In certain embodiments, a Cas9 |
| | | | molecule (e.g., an eaCas9 or eiCas9 |
| | | | molecule) and a gRNA are transcribed |
| | | | from DNA. In certain embodiments, |
| | | | they are encoded on separate |
| | | | molecules. In certain embodiments, the |
| | | | donor template is provided as a separate |
| | | | DNA molecule. |
| DNA | DNA | | In certain embodiments, a Cas9 |
| | | | molecule (e.g., an eaCas9 or eiCas9 |
| | | | molecule) and a gRNA are transcribed |
| | | | from DNA. In certain embodiments, |
| | | | they are encoded on separate |
| | | | molecules. In certain embodiments, the |
| | | | donor template is provided on the same |
| | | | DNA molecule that encodes the gRNA. |
| DNA | | DNA | In certain embodiments, a Cas9 |
| | | | molecule (e.g., an eaCas9 or eiCas9 |
| | | | molecule) and a gRNA are transcribed |
| | | | from DNA, here from a single |
| | | | molecule. In certain embodiments, the |
| | | | donor template is provided as a separate |
| | | | DNA molecule. |
| DNA | DNA | | In certain embodiments, a Cas9 |
| | | | molecule (e.g., an eaCas9 or eiCas9 |
| | | | molecule), and a gRNA are transcribed |
| | | | from DNA. In certain embodiments, |
| | | | they are encoded on separate |
| | | | molecules. In certain embodiments, the |
| | | | donor template is provided on the same |
| | | | DNA molecule that encodes the Cas9. |
| DNA | RNA | DNA | In certain embodiments, a Cas9 |
| | | | molecule (e.g., an eaCas9 or eiCas9 |
| | | | molecule) is transcribed from DNA, and |
| | | | a gRNA is provided as in vitro |
| | | | transcribed or synthesized RNA. In |
| | | | certain embodiments, the donor |
| | | | template is provided as a separate DNA |
| | | | molecule. |
| DNA | RNA | | In certain embodiments, a Cas9 |
| | | | molecule (e.g., an eaCas9 or eiCas9 |
| | | | molecule) is transcribed from DNA, and |
| | | | a gRNA is provided as in vitro |
| | | | transcribed or synthesized RNA. In |
| | | | certain embodiments t, the donor |
| | | | template is provided on the same DNA |
| | | | molecule that encodes the Cas9. |
| mRNA | RNA | DNA | In certain embodiments, a Cas9 |
| | | | molecule (e.g., an eaCas9 or eiCas9 |
| | | | molecule) is translated from in vitro |
| | | | transcribed mRNA, and a gRNA is |
| | | | provided as in vitro transcribed or |
| | | | synthesized RNA. In certain |
| | | | embodiments, the donor template is |
| | | | provided as a DNA molecule. |
| mRNA | DNA | DNA | In certain embodiments, a Cas9 |
| | | | molecule (e.g., an eaCas9 or eiCas9 |
| | | | molecule) is translated from in vitro |
| | | | transcribed mRNA, and a gRNA is |
| | | | transcribed from DNA. In certain |
| | | | embodiments, the donor template is |
| | | | provided as a separate DNA molecule. |
| mRNA | DNA | | In certain embodiments, a Cas9 |
| | | | molecule (e.g., an eaCas9 or eiCas9 |
| | | | molecule) is translated from in vitro |
| | | | transcribed mRNA, and a gRNA is |
| | | | transcribed from DNA. In certain |
| | | | embodiments, the donor template is |
| | | | provided on the same DNA molecule |
| | | | that encodes the gRNA. |
| Protein | DNA | DNA | In certain embodiments, a Cas9 |
| | | | molecule (e.g., an eaCas9 or eiCas9 |
| | | | molecule) is provided as a protein, and a |
| | | | gRNA is transcribed from DNA. In |
| | | | certain embodiments, the donor |
| | | | template is provided as a separate DNA |
| | | | molecule. |
| Protein | DNA | | In certain embodiments, a Cas9 |
| | | | molecule (e.g., an eaCas9 or eiCas9 |
| | | | molecule) is provided as a protein, and a |
| | | | gRNA is transcribed from DNA. In |
| | | | certain embodiments, the donor |
| | | | template is provided on the same DNA |
| | | | molecule that encodes the gRNA. |
| Protein | RNA | DNA | In certain embodiments (e.g., an eaCas9 |
| | | | or eiCas9 molecule) is provided as a |
| | | | protein, and a gRNA is provided as |
| | | | transcribed or synthesized RNA. This |
| | | | delivery method is referred to as “RNP |
| | | | delivery”. In certain embodiments, the |
| | | | donor template is provided as a DNA |
| | | | molecule. |

Table 7 summarizes various delivery methods for the components of a Cas system, e.g., the Cas9 molecule component and the gRNA molecule component, as described herein.

TABLE 7

| | | Delivery | | | |
|---|---|---|---|---|---|
| | | into Non- | Duration | | Type of |
| | | Dividing | of | Genome | Molecule |
| Delivery Vector/Mode | | Cells | Expression | Integration | Delivered |
| Physical (e.g., electroporation, | | YES | Transient | NO | Nucleic Acids |
| particle gun, Calcium | | | | | and Proteins |
| Phosphate transfection, cell | | | | | |
| compression or squeezing) | | | | | |
| Viral | Retrovirus | NO | Stable | YES | RNA |
| | Lentivirus | YES | Stable | YES/NO with | RNA |
| | | | | modifications | |
| | Adenovirus | YES | Transient | NO | DNA |
| | Adeno- | YES | Stable | NO | DNA |
| | Associated Virus | | | | |
| | (AAV) | | | | |
| | Vaccinia Virus | YES | Very | NO | DNA |
| | | | Transient | | |
| | Herpes Simplex | YES | Stable | NO | DNA |
| | Virus | | | | |
| Non-Viral | Cationic | YES | Transient | Depends on | Nucleic Acids |
| | Liposomes | | | what is | and Proteins |
| | | | | delivered | |
| | Polymeric | YES | Transient | Depends on | Nucleic Acids |
| | Nanoparticles | | | what is | and Proteins |
| | | | | delivered | |
| Biological | Attenuated | YES | Transient | NO | Nucleic Acids |
| Non-Viral | Bacteria | | | | |
| Delivery | Engineered | YES | Transient | NO | Nucleic Acids |
| Vehicles | Bacteriophages | | | | |
| | Mammalian | YES | Transient | NO | Nucleic Acids |
| | Virus-like | | | | |
| | Particles | | | | |
| | Biological | YES | Transient | NO | Nucleic Acids |
| | liposomes: | | | | |
| | Erythrocyte | | | | |
| | Ghosts and | | | | |
| | Exosomes | | | | |

[1236] 13.1 DNA-Based Delivery of a Cas9 Molecule and or One or More gRNA Molecule

[1237] Nucleic acid compositions encoding Cas9 molecules (e.g., eaCas9 molecules or eiCas9 molecules), gRNA molecules, a donor template nucleic acid, or any combination (e.g., two or all) thereof can be administered to subjects or delivered into cells by art-known methods or as described herein. For example, Cas9-encoding and/or gRNA-encoding DNA, as well as donor template nucleic acids can be delivered, e.g., by vectors (e.g., viral or non-viral vectors), non-vector based methods (e.g., using naked DNA or DNA complexes), or a combination thereof.

[1238] Nucleic acid compositions encoding Cas9 molecules (e.g., eaCas9 molecules or eiCas9 molecules) and/or gRNA molecules can be conjugated to molecules (e.g., N-acetylgalactosamine) promoting uptake by the target cells (e.g., the target cells described herein). Donor template molecules can likewise be conjugated to molecules (e.g., N-acetylgalactosamine) promoting uptake by the target cells (e.g., the target cells described herein).

[1239] In certain embodiments, the Cas9- and/or gRNA-encoding DNA is delivered by a vector (e.g., viral vector/virus or plasmid).

[1240] Vectors can comprise a sequence that encodes a Cas9 molecule and/or a gRNA molecule, and/or a donor template with high homology to the region (e.g., target sequence) being targeted. In certain embodiments, the donor template comprises all or part of a target sequence. Exemplary donor templates are a repair template, e.g., a gene correction template, or a gene mutation template, e.g., point mutation (e.g., single nucleotide (nt) substitution) template). A vector can also comprise a sequence encoding a signal peptide (e.g., for nuclear localization, nucleolar localization, or mitochondrial localization), fused, e.g., to a Cas9 molecule sequence. For example, the vectors can comprise a nuclear localization sequence (e.g., from SV40) fused to the sequence encoding the Cas9 molecule.

[1241] One or more regulatory/control elements, e.g., promoters, enhancers, introns, polyadenylation signals, a Kozak consensus sequences, internal ribosome entry sites (IRES), a 2A sequence, and splice acceptor or donor can be included in the vectors. In certain embodiments, the promoter is recognized by RNA polymerase II (e.g., a CMV promoter). In other embodiments, the promoter is recognized by RNA polymerase III (e.g., a U6 promoter). In certain embodiments, the promoter is a regulated promoter (e.g., inducible promoter). In certain embodiments, the promoter is a constitutive promoter. In certain embodiments, the promoter is a tissue specific promoter. In certain embodiments, the promoter is a viral promoter. In certain embodiments, the promoter is a non-viral promoter.

[1242] In certain embodiments, the vector or delivery vehicle is a viral vector (e.g., for generation of recombinant viruses). In certain embodiments, the virus is a DNA virus (e.g., dsDNA or ssDNA virus). In certain embodiments, the virus is an RNA virus (e.g., an ssRNA virus). In certain embodiments, the virus infects dividing cells. In other embodiments, the virus infects non-dividing cells. Exemplary viral vectors/viruses include, e.g., retroviruses, lentiviruses, adenovirus, adeno-associated virus (AAV), vaccinia viruses, poxviruses, and herpes simplex viruses.

[1243] In certain embodiments, the virus infects dividing cells. In other embodiments, the virus infects non-dividing cells. In certain embodiments, the virus infects both dividing and non-dividing cells. In certain embodiments, the virus can integrate into the host genome. In certain embodiments, the virus is engineered to have reduced immunity, e.g., in human. In certain embodiments, the virus is replication-competent. In other embodiments, the virus is replication-defective, e.g., having one or more coding regions for the genes necessary for additional rounds of virion replication and/or packaging replaced with other genes or deleted. In certain embodiments, the virus causes transient expression of the Cas9 molecule or molecules and/or the gRNA molecule or molecules. In other embodiments, the virus causes long-lasting, e.g., at least 1 week, 2 weeks, 1 month, 2 months, 3 months, 6 months, 9 months, 1 year, 2 years, or permanent expression, of the Cas9 molecule or molecules and/or the gRNA molecule or molecules. The packaging capacity of the viruses may vary, e.g., from at least about 4 kb to at least about 30 kb, e.g., at least about 5 kb, 10 kb, 15 kb, 20 kb, 25 kb, 30 kb, 35 kb, 40 kb, 45 kb, or 50 kb.

[1244] In certain embodiments, the viral vector recognizes a specific cell type or tissue. For example, the viral vector can be pseudotyped with a different/alternative viral envelope glycoprotein; engineered with a cell type-specific receptor (e.g., genetic modification(s) of one or more viral envelope glycoproteins to incorporate a targeting ligand such as a peptide ligand, a single chain antibody, or a growth factor); and/or engineered to have a molecular bridge with dual specificities with one end recognizing a viral glycoprotein and the other end recognizing a moiety of the target cell surface (e.g., a ligand-receptor, monoclonal antibody, avidin-biotin and chemical conjugation).

[1245] Exemplary viral vectors/viruses include, e.g., retroviruses, lentiviruses, adenovirus, adeno-associated virus (AAV), vaccinia viruses, poxviruses, and herpes simplex viruses.

[1246] In certain embodiments, the Cas9- and/or gRNA-encoding sequence is delivered by a recombinant retrovirus. In certain embodiments, the retrovirus (e.g., Moloney murine leukemia virus) comprises a reverse transcriptase, e.g., that allows integration into the host genome. In certain embodiments, the retrovirus is replication-competent. In other embodiments, the retrovirus is replication-defective, e.g., having one of more coding regions for the genes necessary for additional rounds of virion replication and packaging replaced with other genes, or deleted.

[1247] In certain embodiments, the Cas9- and/or gRNA-encoding nucleic acid sequence is delivered by a recombinant lentivirus. In certain embodiments, the donor template nucleic acid is delivered by a recombinant retrovirus. For example, the lentivirus is replication-defective, e.g., does not comprise one or more genes required for viral replication.

[1248] In certain embodiments, the Cas9- and/or gRNA-encoding nucleic acid sequence is delivered by a recombinant adenovirus. In certain embodiments, the donor template nucleic acid is delivered by a recombinant adenovirus. In certain embodiments, the adenovirus is engineered to have reduced immunity in human.

[1249] In certain embodiments, the Cas9- and/or gRNA-encoding nucleic acid sequence is delivered by a recombinant AAV. In certain embodiments, the donor template nucleic acid is delivered by a recombinant AAV. In certain embodiments, the AAV does not incorporate its genome into that of a host cell, e.g., a target cell as describe herein. In certain embodiments, the AAV can incorporate at least part of its genome into that of a host cell, e.g., a target cell as described herein. In certain embodiments, the AAV is a self-complementary adeno-associated virus (scAAV), e.g., a scAAV that packages both strands which anneal together to form double stranded DNA. AAV serotypes that may be used in the disclosed methods, include AAV1, AAV2, modified AAV2 (e.g., modifications at Y444F, Y500F, Y730F and/or S662V), AAV3, modified AAV3 (e.g., modifications at Y705F, Y731F and/or T492V), AAV4, AAV5, AAV6, modified AAV6 (e.g., modifications at S663V and/or T492V), AAV8, AAV 8.2, AAV9, AAV rh10, and pseudotyped AAV, such as AAV2/8, AAV2/5 and AAV2/6 can also be used in the disclosed methods. In certain embodiments, an AAV capsid that can be used in the methods described herein is a capsid sequence from serotype AAV1, AAV2, AAV3, AAV4, AAV5, AAV6, AAV7, AAV8, AAV9, AAV.rh8, AAV.rh10, AAV.rh32/33, AAV.rh43, AAV.rh64R1, or AAV7m8.

[1250] In certain embodiments, the Cas9- and/or gRNA-encoding nucleic acid sequence is delivered in a re-engineered AAV capsid, e.g., with about 50% or greater, e.g., about 60% or greater, about 70% or greater, about 80% or greater, about 90% or greater, or about 95% or greater, sequence homology with a capsid sequence from serotypes AAV1, AAV2, AAV3, AAV4, AAV5, AAV6, AAV7, AAV8, AAV9, AAV.rh8, AAV.rh10, AAV.rh32/33, AAV.rh43, or AAV.rh64R1.

[1251] In certain embodiments, the Cas9- and/or gRNA-encoding nucleic acid sequence is delivered by a chimeric AAV capsid. In certain embodiments, the donor template nucleic acid is delivered by a chimeric AAV capsid. Exemplary chimeric AAV capsids include, but are not limited to, AAV9i1, AAV2i8, AAV-DJ, AAV2G9, AAV2i8G9, or AAV8G9.

[1252] In certain embodiments, the AAV is a self-complementary adeno-associated virus (scAAV), e.g., a scAAV that packages both strands which anneal together to form double stranded DNA.

[1253] In certain embodiments, the Cas9- and/or gRNA-encoding DNA is delivered by a hybrid virus, e.g., a hybrid of one or more of the viruses described herein. In certain embodiments, the hybrid virus is hybrid of an AAV (e.g., of any AAV serotype), with a Bocavirus, B19 virus, porcine AAV, goose AAV, feline AAV, canine AAV, or MVM.

[1254] A packaging cell is used to form a virus particle that is capable of infecting a target cell. Exemplary packaging cells include 293 cells, which can package adenovirus, and ψ2 or PA317 cells, which can package retrovirus. A viral vector used in gene therapy is usually generated by a producer cell line that packages a nucleic acid vector into a viral particle. The vector typically contains the minimal viral sequences required for packaging and subsequent integration into a host or target cell (if applicable), with other viral sequences being replaced by an expression cassette encoding the protein to be expressed, e.g., components for a Cas9 molecule, e.g., two Cas9 components. For example, an AAV vector used in gene therapy typically only possesses inverted terminal repeat (ITR) sequences from the AAV genome which are required for packaging and gene expression in the host or target cell. The missing viral functions can be supplied in trans by the packaging cell line and/or plasmid containing E2A, E4, and VA genes from adenovirus, and plasmid encoding Rep and Cap genes from AAV, as described in “Triple Transfection Protocol.” Henceforth, the viral DNA is packaged in a cell line, which contains a helper plasmid encoding the other AAV genes, namely rep and cap, but lacking ITR sequences. In certain embodiments, the viral DNA is packaged in a producer cell line, which contains E1A and/or E1B genes from adenovirus. The cell line is also infected with adenovirus as a helper. The helper virus (e.g., adenovirus or HSV) or helper plasmid promotes replication of the AAV vector and expression of AAV genes from the helper plasmid with ITRs. The helper plasmid is not packaged in significant amounts due to a lack of ITR sequences. Contamination with adenovirus can be reduced by, e.g., heat treatment to which adenovirus is more sensitive than AAV.

[1255] In certain embodiments, the viral vector is capable of cell type and/or tissue type recognition. For example, the viral vector can be pseudotyped with a different/alternative viral envelope glycoprotein; engineered with a cell type-specific receptor (e.g., genetic modification of the viral envelope glycoproteins to incorporate targeting ligands such as peptide ligands, single chain antibodies, growth factors); and/or engineered to have a molecular bridge with dual specificities with one end recognizing a viral glycoprotein and the other end recognizing a moiety of the target cell surface (e.g., ligand-receptor, monoclonal antibody, avidin-biotin and chemical conjugation).

[1256] In certain embodiments, the viral vector achieves cell type specific expression. For example, a tissue-specific promoter can be constructed to restrict expression of the transgene (Cas9 and gRNA) to only the target cell. The specificity of the vector can also be mediated by microRNA-dependent control of transgene expression. In certain embodiments, the viral vector has increased efficiency of fusion of the viral vector and a target cell membrane. For example, a fusion protein such as fusion-competent hemagglutin (HA) can be incorporated to increase viral uptake into cells. In certain embodiments, the viral vector has the ability of nuclear localization. For example, a virus that requires the breakdown of the nuclear envelope (during cell division) and therefore can not infect a non-diving cell can be altered to incorporate a nuclear localization peptide in the matrix protein of the virus thereby enabling the transduction of non-proliferating cells.

[1257] In certain embodiments, the Cas9- and/or gRNA-encoding nucleic acid sequence is delivered by a non-vector based method (e.g., using naked DNA or DNA complexes). For example, the DNA can be delivered, e.g., by organically modified silica or silicate (Ormosil), electroporation, transient cell compression or squeezing (e.g., as described in Lee, et al, 2012, Nano Lett 12: 6322-27), gene gun, sonoporation, magnetofection, lipid-mediated transfection, dendrimers, inorganic nanoparticles, calcium phosphates, or a combination thereof.

[1258] In certain embodiments, delivery via electroporation comprises mixing the cells with the Cas9-and/or gRNA-encoding DNA in a cartridge, chamber or cuvette and applying one or more electrical impulses of defined duration and amplitude. In certain embodiments, delivery via electroporation is performed using a system in which cells are mixed with the Cas9- and/or gRNA-encoding DNA in a vessel connected to a device (e.g, a pump) which feeds the mixture into a cartridge, chamber or cuvette wherein one or more electrical impulses of defined duration and amplitude are applied, after which the cells are delivered to a second vessel.

[1259] In certain embodiments, the Cas9- and/or gRNA-encoding nucleic acid sequence is delivered by a combination of a vector and a non-vector based method. In certain embodiments, the donor template nucleic acid is delivered by a combination of a vector and a non-vector based method. For example, virosomes combine liposomes combined with an inactivated virus (e.g., HIV or influenza virus), which can result in more efficient gene transfer, e.g., in respiratory epithelial cells than either viral or liposomal methods alone.

[1260] In certain embodiments, the delivery vehicle is a non-viral vector. In certain embodiments, the non-viral vector is an inorganic nanoparticle. Exemplary inorganic nanoparticles include, e.g., magnetic nanoparticles (e.g., Fe₃MnO₂) and silica. The outer surface of the nanoparticle can be conjugated with a positively charged polymer (e.g., polyethylenimine, polylysine, polyserine) which allows for attachment (e.g., conjugation or entrapment) of payload. In certain embodiments, the non-viral vector is an organic nanoparticle (e.g., entrapment of the payload inside the nanoparticle). Exemplary organic nanoparticles include, e.g., SNALP liposomes that contain cationic lipids together with neutral helper lipids which are coated with polyethylene glycol (PEG) and protamine and nucleic acid complex coated with lipid coating.

[1261] Exemplary lipids for gene transfer are shown below in Table 8.

TABLE 8
Lipids Used for Gene Transfer

| Lipid | Abbreviation | Feature |
|---|---|---|
| 1,2-Dioleoyl-sn-glycero-3-phosphatidylcholine | DOPC | Helper |
| 1,2-Dioleoyl-sn-glycero-3-phosphatidylethanolamine | DOPE | Helper |
| Cholesterol | | Helper |
| N-[1-(2,3-Dioleyloxy)propyl]N,N,N-trimethylammonium | DOTMA | Cationic |
| chloride | | |
| 1,2-Dioleoyloxy-3-trimethylammonium-propane | DOTAP | Cationic |
| Dioctadecylamidoglycylspermine | DOGS | Cationic |
| N-(3-Aminopropyl)-N,N-dimethyl-2,3-bis(dodecyloxy)- | GAP-DLRIE | Cationic |
| 1-propanaminium bromide | | |
| Cetyltrimethylammonium bromide | CTAB | Cationic |
| 6-Lauroxyhexyl ornithinate | LHON | Cationic |
| 1-(2,3-Dioleoyloxypropyl)-2,4,6-trimethylpyridinium | 2Oc | Cationic |
| 2,3-Dioleyloxy-N-[2(sperminecarboxamido-ethyl]-N,N- | DOSPA | Cationic |
| dimethyl-1-propanaminium trifluoroacetate | | |
| 1,2-Dioleyl-3-trimethylammonium-propane | DOPA | Cationic |
| N-(2-Hydroxyethyl)-N,N-dimethyl-2,3- | MDRIE | Cationic |
| bis(tetradecyloxy)-1-propanaminium bromide | | |
| Dimyristooxypropyl dimethyl hydroxyethyl ammonium | DMRI | Cationic |
| bromide | | |
| 3β-[N-(N′,N′-Dimethylaminoethane)- | DC-Chol | Cationic |
| carbamoyl]cholesterol | | |
| Bis-guanidium-tren-cholesterol | BGTC | Cationic |
| 1,3-Diodeoxy-2-(6-carboxy-spermyl)-propylamide | DOSPER | Cationic |
| Dimethyloctadecylammonium bromide | DDAB | Cationic |
| Dioctadecylamidoglicylspermidin | DSL | Cationic |
| rac-[(2,3-Dioctadecyloxypropyl)(2-hydroxyethyl)]- | CLIP-1 | Cationic |
| dimethylammonium chloride | | |
| rac-[2(2,3-Dihexadecyloxypropyl- | CLIP-6 | Cationic |
| oxymethyloxy)ethyl]trimethylammonium bromide | | |
| Ethyldimyristoylphosphatidylcholine | EDMPC | Cationic |
| 1,2-Distearyloxy-N,N-dimethyl-3-aminopropane | DSDMA | Cationic |
| 1,2-Dimyristoyl-trimethylammonium propane | DMTAP | Cationic |
| O,O′-Dimyristyl-N-lysyl aspartate | DMKE | Cationic |
| 1,2-Distearoyl-sn-glycero-3-ethylphosphocholine | DSEPC | Cationic |
| N-Palmitoyl D-erythro-sphingosyl carbamoyl-spermine | CCS | Cationic |
| N-t-Butyl-N0-tetradecyl-3- | diC14-amidine | Cationic |
| tetradecylaminopropionamidine | | |
| Octadecenolyoxy[ethyl-2-heptadecenyl-3 hydroxyethyl] | DOTIM | Cationic |
| imidazolinium chloride | | |
| N1-Cholesteryloxycarbonyl-3,7-diazanonane-1,9- | CDAN | Cationic |
| diamine | | |
| 2-(3-[Bis(3-amino-propyl)-amino]propylamino)-N- | RPR209120 | Cationic |
| ditetradecylcarbamoylme-ethyl-acetamide | | |
| 1,2-dilinoleyloxy-3-dimethylaminopropane | DLinDMA | Cationic |
| 2,2-dilinoleyl-4-dimethylaminoethyl-[1,3]-dioxolane | DLin-KC2- | Cationic |
| | DMA | |
| dilinoleyl-methyl-4-dimethylaminobutyrate | DLin-MC3- | Cationic |
| | DMA | |

[1262] Exemplary polymers for gene transfer are shown below in Table 9.

TABLE 9
Polymers Used for Gene Transfer

| Polymer | Abbreviation |
|---|---|
| Poly(ethylene)glycol | PEG |
| Polyethylenimine | PEI |
| Dithiobis(succinimidylpropionate) | DSP |
| Dimethyl-3,3′-dithiobispropionimidate | DTBP |
| Poly(ethylene imine) biscarbamate | PEIC |
| Poly(L-lysine) | PLL |
| Histidine modified PLL | |
| Poly(N-vinylpyrrolidone) | PVP |
| Poly(propylenimine) | PPI |
| Poly(amidoamine) | PAMAM |
| Poly(amido ethylenimine) | SS-PAEI |
| Triethylenetetramine | TETA |
| Poly(β-aminoester) | |
| Poly(4-hydroxy-L-proline ester) | PHP |
| Poly(allylamine) | |
| Poly(α-[4-aminobutyl]-L-glycolic acid) | PAGA |
| Poly(D,L-lactic-co-glycolic acid) | PLGA |
| Poly(N-ethyl-4-vinylpyridinium bromide) | |
| Poly(phosphazene)s | PPZ |
| Poly(phosphoester)s | PPE |
| Poly(phosphoramidate)s | PPA |
| Poly(N-2-hydroxypropylmethacrylamide) | pHPMA |
| Poly (2-(dimethylamino)ethyl methacrylate) | pDMAEMA |
| Poly(2-aminoethyl propylene phosphate) | PPE-EA |
| Chitosan | |
| Galactosylated chitosan | |
| N-Dodacylated chitosan | |
| Histone | |
| Collagen | |
| Dextran-spermine | D-SPM |

[1263] In certain embodiments, the vehicle has targeting modifications to increase target cell update of nanoparticles and liposomes, e.g., cell specific antigens, monoclonal antibodies, single chain antibodies, aptamers, polymers, sugars (e.g., N-acetylgalactosamine (GalNAc)), and cell penetrating peptides. In certain embodiments, the vehicle uses fusogenic and endosome-destabilizing peptides/polymers. In certain embodiments, the vehicle undergoes acid-triggered conformational changes (e.g., to accelerate endosomal escape of the cargo). In certain embodiments, a stimuli-cleavable polymer is used, e.g., for release in a cellular compartment. For example, disulfide-based cationic polymers that are cleaved in the reducing cellular environment can be used.

[1264] In certain embodiments, the delivery vehicle is a biological non-viral delivery vehicle. In certain embodiments, the vehicle is an attenuated bacterium (e.g., naturally or artificially engineered to be invasive but attenuated to prevent pathogenesis and expressing the transgene (e.g., Listeria monocytogenes, certain Salmonella strains, Bifidobacterium longum, and modified Escherichia coli), bacteria having nutritional and tissue-specific tropism to target specific tissues, bacteria having modified surface proteins to alter target tissue specificity). In certain embodiments, the vehicle is a genetically modified bacteriophage (e.g., engineered phages having large packaging capacity, less immunogenic, containing mammalian plasmid maintenance sequences and having incorporated targeting ligands). In certain embodiments, the vehicle is a mammalian virus-like particle. For example, modified viral particles can be generated (e.g., by purification of the “empty” particles followed by ex vivo assembly of the virus with the desired cargo). The vehicle can also be engineered to incorporate targeting ligands to alter target tissue specificity. In certain embodiments, the vehicle is a biological liposome. For example, the biological liposome is a phospholipid-based particle derived from human cells (e.g., erythrocyte ghosts, which are red blood cells broken down into spherical structures derived from the subject (e.g., tissue targeting can be achieved by attachment of various tissue or cell-specific ligands), or secretory exosomes—subject (i.e., patient) derived membrane-bound nanovesicle (30 -100 nm) of endocytic origin (e.g., can be produced from various cell types and can therefore be taken up by cells without the need of for targeting ligands).

[1265] In certain embodiments, one or more nucleic acid molecules (e.g., DNA molecules) other than the components of a Cas system, e.g., the Cas9 molecule component or components and/or the gRNA molecule component or components described herein, are delivered. In certain embodiments, the nucleic acid molecule is delivered at the same time as one or more of the components of the Cas system are delivered. In certain embodiments, the nucleic acid molecule is delivered before or after (e.g., less than about 30 minutes, 1 hour, 2 hours, 3 hours, 6 hours, 9 hours, 12 hours, 1 day, 2 days, 3 days, 1 week, 2 weeks, or 4 weeks) one or more of the components of the Cas system are delivered. In certain embodiments, the nucleic acid molecule is delivered by a different means than one or more of the components of the Cas system, e.g., the Cas9 molecule component and/or the gRNA molecule component, are delivered. The nucleic acid molecule can be delivered by any of the delivery methods described herein. For example, the nucleic acid molecule can be delivered by a viral vector, e.g., an integration-deficient lentivirus, and the Cas9 molecule component or components and/or the gRNA molecule component or components can be delivered by electroporation, e.g., such that the toxicity caused by nucleic acids (e.g., DNAs) can be reduced. In certain embodiments, the nucleic acid molecule encodes a therapeutic protein, e.g., a protein described herein. In certain embodiments, the nucleic acid molecule encodes an RNA molecule, e.g., an RNA molecule described herein.

[1266] 13.2 Delivery of a RNA Encoding a Cas9 Molecule

[1267] RNA encoding Cas9 molecules (e.g., eaCas9 molecules or eiCas9 molecules) and/or gRNA molecules, can be delivered into cells, e.g., target cells described herein, by art-known methods or as described herein. For example, Cas9-encoding and/or gRNA-encoding RNA can be delivered, e.g., by microinjection, electroporation, transient cell compression or squeezing (e.g., as described in Lee, et al., 2012, Nano Lett 12: 6322-27), lipid-mediated transfection, peptide-mediated delivery, or a combination thereof. Cas9-encoding and/or gRNA-encoding RNA can be conjugated to molecules to promote uptake by the target cells (e.g., target cells described herein).

[1268] In certain embodiments, delivery via electroporation comprises mixing the cells with the RNA encoding Cas9 molecules (e.g., eaCas9 molecules, eiCas9 molecules or eiCas9 fusion proteins) and/or gRNA molecules with or without donor template nucleic acid molecules, in a cartridge, chamber or cuvette and applying one or more electrical impulses of defined duration and amplitude. In certain embodiments, delivery via electroporation is performed using a system in which cells are mixed with the RNA encoding Cas9 molecules (e.g., eaCas9 molecules, eiCas9 molecules or eiCas9 fusion protiens) and/or gRNA molecules with or without donor template nucleic acid molecules, in a vessel connected to a device (e.g., a pump) which feeds the mixture into a cartridge, chamber or cuvette wherein one or more electrical impulses of defined duration and amplitude are applied, after which the cells are delivered to a second vessel. Cas9-encoding and/or gRNA-encoding RNA can be conjugated to molecules to promote uptake by the target cells (e.g., target cells described herein).

[1269] 13.3 Delivery of a Cas9 Molecule Protein

[1270] Cas9 molecules (e.g., eaCas9 molecules or eiCas9 molecules) can be delivered into cells by art-known methods or as described herein. For example, Cas9 protein molecules can be delivered, e.g., by microinjection, electroporation, transient cell compression or squeezing (e.g., as described in Lee, et al, 2012, Nano Lett 12: 6322-27), lipid-mediated transfection, peptide-mediated delivery, or a combination thereof. Delivery can be accompanied by DNA encoding a gRNA or by a gRNA. Cas9 protein can be conjugated to molecules promoting uptake by the target cells (e.g., target cells described herein).

[1271] In certain embodiments, delivery via electroporation comprises mixing the cells with the Cas9 molecules (e.g., eaCas9 molecules, eiCas9 molecules or eiCas9 fusion protiens) and/or gRNA molecules with or without donor nucleic acid, in a cartridge, chamber or cuvette and applying one or more electrical impulses of defined duration and amplitude. In certain embodiments, delivery via electroporation is performed using a system in which cells are mixed with the Cas9 molecules (e.g., eaCas9 molecules, eiCas9 molecules or eiCas9 fusion protiens) and/or gRNA molecules in a vessel connected to a device (e.g., a pump) which feeds the mixture into a cartridge, chamber or cuvette wherein one or more electrical impulses of defined duration and amplitude are applied, after which the cells are delivered to a second vessel. Cas9-encoding and/or gRNA-encoding RNA can be conjugated to molecules to promote uptake by the target cells (e.g., target cells described herein).

[1272] 13. 4 RNP Delivery of Cas9 Molecule Protein and gRNA

[1273] In certain embodiments, the Cas9 molecule and gRNA molecule are delivered to target cells via Ribonucleoprotein (RNP) delivery. In certain embodiments, the Cas9 molecule is provided as a protein, and the gRNA molecule is provided as transcribed or synthesized RNA. The gRNA molecule can be generated by chemical synthesis. In certain embodiments, the gRNA molecule forms a RNP complex with the Cas9 molecule protein under suitable condition prior to delivery to the target cells. The RNP complex can be delivered to the target cells by any suitable methods known in the art, e.g., by electroporation, lipid-mediated transfection, protein or DNA-based shuttle, mechanical force, or hydraulic force. In certain embodiments, the RNP complex is delivered to the target cells by electroporation.

[1274] 13.5 Route of Administration

[1275] Systemic modes of administration include oral and parenteral routes. Parenteral routes include, by way of example, intravenous, intrarterial, intraosseous, intramuscular, intradermal, subcutaneous, intranasal and intraperitoneal routes. Components administered systemically may be modified or formulated to target the components to cells of the blood and bone marrow.

[1276] Local modes of administration include, by way of example, intra-bone marrow, intrathecal, and intra-cerebroventricular routes. In certain embodiments, significantly smaller amounts of the components (compared with systemic approaches) may exert an effect when administered locally (for example, intra-bone marrow) compared to when administered systemically (for example, intravenously). Local modes of administration can reduce or eliminate the incidence of potentially toxic side effects that may occur when therapeutically effective amounts of a component are administered systemically.

[1277] In certain embodiments, components described herein are delivered by intra-bone marrow injection. Injections may be made directly into the bone marrow compartment of one or more than one bone. In certain embodiments, nanoparticle or viral, e.g., AAV vector, delivery is via intra-bone marrow injection.

[1278] Administration may be provided as a periodic bolus or as continuous infusion from an internal reservoir or from an external reservoir (for example, from an intravenous bag). Components may be administered locally, for example, by continuous release from a sustained release drug delivery device.

[1279] In addition, components may be formulated to permit release over a prolonged period of time. A release system can include a matrix of a biodegradable material or a material which releases the incorporated components by diffusion. The components can be homogeneously or heterogeneously distributed within the release system. A variety of release systems may be useful, however, the choice of the appropriate system can depend upon rate of release required by a particular application. Both non-degradable and degradable release systems can be used. Suitable release systems include polymers and polymeric matrices, non-polymeric matrices, or inorganic and organic excipients and diluents such as, but not limited to, calcium carbonate and sugar (for example, trehalose). Release systems may be natural or synthetic. However, synthetic release systems are preferred because generally they are more reliable, more reproducible and produce more defined release profiles. The release system material can be selected so that components having different molecular weights are released by diffusion through or degradation of the material.

[1280] Representative synthetic, biodegradable polymers include, for example: polyamides such as poly(amino acids) and poly(peptides); polyesters such as poly(lactic acid), poly(glycolic acid), poly(lactic-co-glycolic acid), and poly(caprolactone); poly(anhydrides); polyorthoesters; polycarbonates; and chemical derivatives thereof (substitutions, additions of chemical groups, for example, alkyl, alkylene, hydroxylations, oxidations, and other modifications routinely made by those skilled in the art), copolymers and mixtures thereof. Representative synthetic, non-degradable polymers include, for example: polyethers such as poly(ethylene oxide), poly(ethylene glycol), and poly(tetramethylene oxide); vinyl polymers-polyacrylates and polymethacrylates such as methyl, ethyl, other alkyl, hydroxyethyl methacrylate, acrylic and methacrylic acids, and others such as poly(vinyl alcohol), poly(vinyl pyrolidone), and poly(vinyl acetate); poly(urethanes); cellulose and its derivatives such as alkyl, hydroxyalkyl, ethers, esters, nitrocellulose, and various cellulose acetates; polysiloxanes; and any chemical derivatives thereof (substitutions, additions of chemical groups, for example, alkyl, alkylene, hydroxylations, oxidations, and other modifications routinely made by those skilled in the art), copolymers and mixtures thereof.

[1281] Poly(lactide-co-glycolide) microsphere can also be used for intraocular injection. Typically the microspheres are composed of a polymer of lactic acid and glycolic acid, which are structured to form hollow spheres. The spheres can be approximately 15-30 microns in diameter and can be loaded with components described herein.

[1282] 13.6 Bi-Modal or Differential Delivery of Components

[1283] Separate delivery of the components of a Cas system, e.g., the Cas9 molecule component or components and the gRNA molecule component or components, and more particularly, delivery of the components by differing modes, can enhance performance, e.g., by improving tissue specificity and safety.

[1284] In certain embodiments, the Cas9 molecule or molecules and the gRNA molecule or molecules are delivered by different modes, or as sometimes referred to herein as differential modes. Different or differential modes, as used herein, refer modes of delivery that confer different pharmacodynamic or pharmacokinetic properties on the subject component molecule, e.g., a Cas9 molecule or molecules or gRNA molecule or molecules, template nucleic acid, or payload. For example, the modes of delivery can result in different tissue distribution, different half-life, or different temporal distribution, e.g., in a selected compartment, tissue, or organ.

[1285] Some modes of delivery, e.g., delivery by a nucleic acid vector that persists in a cell, or in progeny of a cell, e.g., by autonomous replication or insertion into cellular nucleic acid, result in more persistent expression of and presence of a component. Examples include viral, e.g., AAV or lentivirus, delivery.

[1286] By way of example, the components, e.g., a Cas9 molecule and a gRNA molecule, can be delivered by modes that differ in terms of resulting half-life or persistence of the delivered component within the body, or in a particular compartment, tissue or organ. In certain embodiments, a gRNA molecule can be delivered by such modes. The Cas9 molecule component can be delivered by a mode which results in less persistence or less exposure to the body or a particular compartment or tissue or organ. In certain embodiments, two Cas9 molecules can by delivered by modes that differ in terms of resulting half-life or persistence of the delivered component within the body, or in a particular compartment, tissue or organ. In certain embodiments, two or more gRNA molecules can by delivered by modes that differ in terms of resulting half-life or persistence of the delivered component within the body, or in a particular compartment, tissue or organ.

[1287] More generally, in certain embodiments, a first mode of delivery is used to deliver a first component and a second mode of delivery is used to deliver a second component. The first mode of delivery confers a first pharmacodynamic or pharmacokinetic property. The first pharmacodynamic property can be, e.g., distribution, persistence, or exposure, of the component, or of a nucleic acid that encodes the component, in the body, a compartment, tissue or organ. The second mode of delivery confers a second pharmacodynamic or pharmacokinetic property. The second pharmacodynamic property can be, e.g., distribution, persistence, or exposure, of the component, or of a nucleic acid that encodes the component, in the body, a compartment, tissue or organ.

[1288] In certain embodiments, the first pharmacodynamic or pharmacokinetic property, e.g., distribution, persistence or exposure, is more limited than the second pharmacodynamic or pharmacokinetic property.

[1289] In certain embodiments, the first mode of delivery is selected to optimize, e.g., minimize, a pharmacodynamic or pharmacokinetic property, e.g., distribution, persistence or exposure.

[1290] In certain embodiments, the second mode of delivery is selected to optimize, e.g., maximize, a pharmacodynamic or pharmacokinetic property, e.g., distribution, persistence or exposure.

[1291] In certain embodiments, the first mode of delivery comprises the use of a relatively persistent element, e.g., a nucleic acid, e.g., a plasmid or viral vector, e.g., an AAV or lentivirus. As such vectors are relatively persistent product transcribed from them would be relatively persistent.

[1292] In certain embodiments, the second mode of delivery comprises a relatively transient element, e.g., an RNA or protein.

[1293] In certain embodiments, the first component comprises gRNA, and the delivery mode is relatively persistent, e.g., the gRNA is transcribed from a plasmid or viral vector, e.g., an AAV or lentivirus. Transcription of these genes would be of little physiological consequence because the genes do not encode for a protein product, and the gRNAs are incapable of acting in isolation. The second component, a Cas9 molecule, is delivered in a transient manner, for example as mRNA or as protein, ensuring that the full Cas9 molecule/gRNA molecule complex is only present and active for a short period of time.

[1294] In certain embodiments, the second component, two Cas9 molecules, is delivered in a transient manner, for example as mRNA or as protein, ensuring that the full Cas9/gRNA complex is only present and active for a short period of time. In certain embodiments, the second components, two Cas9 molecules, are delivered at two separate time points, e.g. a first Cas9 molecule delivered at one time point and a second Cas9 molecule delivered at a second time point, for example as mRNA or as protein, ensuring that the full Cas9/gRNA complexes are only present and active for a short period of time.

[1295] Furthermore, the components can be delivered in different molecular form or with different delivery vectors that complement one another to enhance safety and tissue specificity.

[1296] Use of differential delivery modes can enhance performance, safety and efficacy. E.g., the likelihood of an eventual off-target modification can be reduced. Delivery of immunogenic components, e.g., Cas9 molecules, by less persistent modes can reduce immunogenicity, as peptides from the bacterially-derived Cas enzyme are displayed on the surface of the cell by MEW molecules. A two-part delivery system can alleviate these drawbacks.

[1297] Differential delivery modes can be used to deliver components to different, but overlapping target regions. The formation active complex is minimized outside the overlap of the target regions. Thus, in certain embodiments, a first component, e.g., a gRNA molecule is delivered by a first delivery mode that results in a first spatial, e.g., tissue, distribution. A second component, e.g., a Cas9 molecule is delivered by a second delivery mode that results in a second spatial, e.g., tissue, distribution. Two distinct second components, e.g., two distinct Cas9 molecules, are delivered by two distinct delivery modes that result in a second and third spatial, e.g., tissue, distribution. In certain embodiments, the first mode comprises a first element selected from a liposome, nanoparticle, e.g., polymeric nanoparticle, and a nucleic acid, e.g., viral vector. The second mode comprises a second element selected from the group. The third mode comprises a second element selected from the group. In certain embodiments, the first mode of delivery comprises a first targeting element, e.g., a cell specific receptor or an antibody, and the second mode of delivery does not include that element. In embodiment, the second mode of delivery comprises a second targeting element, e.g., a second cell specific receptor or second antibody. In embodiment, the third mode of delivery comprises a second targeting element, e.g., a second cell specific receptor or second antibody.

[1298] When the Cas9 molecule or molecules are delivered in a virus delivery vector, a liposome, or polymeric nanoparticle, there is the potential for delivery to and therapeutic activity in multiple tissues, when it may be desirable to only target a single tissue. A two-part delivery system can resolve this challenge and enhance tissue specificity. If the gRNA molecule or molecules and the Cas9 molecule or molecules are packaged in separated delivery vehicles with distinct but overlapping tissue tropism, the fully functional complex is only be formed in the tissue that is targeted by both vectors.

[1299] In certain embodiments, components designed to alter (e.g., introduce a mutation into CCR5 or CXCR4) in one target position are delivered prior to, concurrent with, or subsequent to components designed to alter (e.g., introduce a mutation into CCR5 or CXCR4) a second target position.

[1300] 13.7 Ex Vivo Delivery

[1301] In certain embodiments, each component of the genome editing system described in Table 6 are introduced into a cell which is then introduced into the subject, e.g., cells are removed from a subject, manipulated ex vivo and then introduced into the subject. Methods of introducing the components can include, e.g., any of the delivery methods described in Table 7.

### 14. Modified Nucleosides, Nucleotides, and Nucleic Acids

[1302] Modified nucleosides and modified nucleotides can be present in nucleic acids, e.g., particularly gRNA, but also other forms of RNA, e.g., mRNA, RNAi, or siRNA. As described herein, “nucleoside” is defined as a compound containing a five-carbon sugar molecule (a pentose or ribose) or derivative thereof, and an organic base, purine or pyrimidine, or a derivative thereof. As described herein, “nucleotide” is defined as a nucleoside further comprising a phosphate group.

[1303] Modified nucleosides and nucleotides can include one or more of:

[1304] (i) alteration, e.g., replacement, of one or both of the non-linking phosphate oxygens and/or of one or more of the linking phosphate oxygens in the phosphodiester backbone linkage;

[1305] (ii) alteration, e.g., replacement, of a constituent of the ribose sugar, e.g., of the 2′ hydroxyl on the ribose sugar;

[1306] (iii) wholesale replacement of the phosphate moiety with “dephospho” linkers;

[1307] (iv) modification or replacement of a naturally occurring nucleobase;

[1308] (v) replacement or modification of the ribose-phosphate backbone;

[1309] (vi) modification of the 3′ end or 5′ end of the oligonucleotide, e.g., removal, modification or replacement of a terminal phosphate group or conjugation of a moiety; and

[1310] (vii) modification of the sugar.

[1311] The modifications listed above can be combined to provide modified nucleosides and nucleotides that can have two, three, four, or more modifications. For example, a modified nucleoside or nucleotide can have a modified sugar and a modified nucleobase. In certain embodiments, every base of a gRNA is modified, e.g., all bases have a modified phosphate group, e.g., all are phosphorothioate groups. In certain embodiments, all, or substantially all, of the phosphate groups of a unimolecular or modular gRNA molecule are replaced with phosphorothioate groups.

[1312] In certain embodiments, modified nucleotides, e.g., nucleotides having modifications as described herein, can be incorporated into a nucleic acid, e.g., a “modified nucleic acid.” In certain embodiments, the modified nucleic acids comprise one, two, three or more modified nucleotides. In certain embodiments, at least 5% (e.g., at least about 5%, at least about 10%, at least about 15%, at least about 20%, at least about 25%, at least about 30%, at least about 35%, at least about 40%, at least about 45%, at least about 50%, at least about 55%, at least about 60%, at least about 65%, at least about 70%, at least about 75%, at least about 80%, at least about 85%, at least about 90%, at least about 95%, or about 100%) of the positions in a modified nucleic acid are a modified nucleotides.

[1313] Unmodified nucleic acids can be prone to degradation by, e.g., cellular nucleases. For example, nucleases can hydrolyze nucleic acid phosphodiester bonds. Accordingly, in certain embodiments, the modified nucleic acids described herein can contain one or more modified nucleosides or nucleotides, e.g., to introduce stability toward nucleases.

[1314] In certain embodiments, the modified nucleosides, modified nucleotides, and modified nucleic acids described herein can exhibit a reduced innate immune response when introduced into a population of cells, both in vivo and ex vivo. The term “innate immune response” includes a cellular response to exogenous nucleic acids, including single stranded nucleic acids, generally of viral or bacterial origin, which involves the induction of cytokine expression and release, particularly the interferons, and cell death. In certain embodiments, the modified nucleosides, modified nucleotides, and modified nucleic acids described herein can disrupt binding of a major groove interacting partner with the nucleic acid. In certain embodiments, the modified nucleosides, modified nucleotides, and modified nucleic acids described herein can exhibit a reduced innate immune response when introduced into a population of cells, both in vivo and ex vivo, and also disrupt binding of a major groove interacting partner with the nucleic acid.

[1315] 14.1 Definitions of Chemical Groups

[1316] As used herein, “alkyl” is meant to refer to a saturated hydrocarbon group which is straight-chained or branched. Example alkyl groups include methyl (Me), ethyl (Et), propyl (e.g., n-propyl and isopropyl), butyl (e.g., n-butyl, isobutyl, t-butyl), pentyl (e.g., n-pentyl, isopentyl, neopentyl), and the like. An alkyl group can contain from 1 to about 20, from 2 to about 20, from 1 to about 12, from 1 to about 8, from 1 to about 6, from 1 to about 4, or from 1 to about 3 carbon atoms.

[1317] As used herein, “aryl” refers to monocyclic or polycyclic (e.g., having 2, 3 or 4 fused rings) aromatic hydrocarbons such as, for example, phenyl, naphthyl, anthracenyl, phenanthrenyl, indanyl, indenyl, and the like. In certain embodiments, aryl groups have from 6 to about 20 carbon atoms.

[1318] As used herein, “alkenyl” refers to an aliphatic group containing at least one double bond.

[1319] As used herein, “alkynyl” refers to a straight or branched hydrocarbon chain containing 2-12 carbon atoms and characterized in having one or more triple bonds. Examples of alkynyl groups include, but are not limited to, ethynyl, propargyl, and 3-hexynyl.

[1320] As used herein, “arylalkyl” or “aralkyl” refers to an alkyl moiety in which an alkyl hydrogen atom is replaced by an aryl group. Aralkyl includes groups in which more than one hydrogen atom has been replaced by an aryl group. Examples of “arylalkyl” or “aralkyl” include benzyl, 2-phenylethyl, 3-phenylpropyl, 9-fluorenyl, benzhydryl, and trityl groups.

[1321] As used herein, “cycloalkyl” refers to a cyclic, bicyclic, tricyclic, or polycyclic non-aromatic hydrocarbon groups having 3 to 12 carbons. Examples of cycloalkyl moieties include, but are not limited to, cyclopropyl, cyclopentyl, and cyclohexyl.

[1322] As used herein, “heterocyclyl” refers to a monovalent radical of a heterocyclic ring system. Representative heterocyclyls include, without limitation, tetrahydrofuranyl, tetrahydrothienyl, pyrrolidinyl, pyrrolidonyl, piperidinyl, pyrrolinyl, piperazinyl, dioxanyl, dioxolanyl, diazepinyl, oxazepinyl, thiazepinyl, and morpholinyl.

[1323] As used herein, “heteroaryl” refers to a monovalent radical of a heteroaromatic ring system. Examples of heteroaryl moieties include, but are not limited to, imidazolyl, oxazolyl, thiazolyl, triazolyl, pyrrolyl, furanyl, indolyl, thiophenyl pyrazolyl, pyridinyl, pyrazinyl, pyridazinyl, pyrimidinyl, indolizinyl, purinyl, naphthyridinyl, quinolyl, and pteridinyl.

[1324] 14.2 Phosphate Backbone Modifications

[1325] 14.2.1 The Phosphate Group

[1326] In certain embodiments, the phosphate group of a modified nucleotide can be modified by replacing one or more of the oxygens with a different substituent. Further, the modified nucleotide, e.g., modified nucleotide present in a modified nucleic acid, can include the wholesale replacement of an unmodified phosphate moiety with a modified phosphate as described herein. In certain embodiments, the modification of the phosphate backbone can include alterations that result in either an uncharged linker or a charged linker with unsymmetrical charge distribution.

[1327] Examples of modified phosphate groups include phosphorothioate, phosphoroselenates, borano phosphates, borano phosphate esters, hydrogen phosphonates, phosphoroamidates, alkyl or aryl phosphonates and phosphotriesters. In certain embodiments, one of the non-bridging phosphate oxygen atoms in the phosphate backbone moiety can be replaced by any of the following groups: sulfur (S), selenium (Se), BR₃ (wherein R can be, e.g., hydrogen, alkyl, or aryl), C (e.g., an alkyl group, an aryl group, and the like), H, NR₂ (wherein R can be, e.g., hydrogen, alkyl, or aryl), or OR (wherein R can be, e.g., alkyl or aryl). The phosphorous atom in an unmodified phosphate group is achiral. However, replacement of one of the non-bridging oxygens with one of the above atoms or groups of atoms can render the phosphorous atom chiral; that is to say that a phosphorous atom in a phosphate group modified in this way is a stereogenic center. The stereogenic phosphorous atom can possess either the “R” configuration (herein Rp) or the “S” configuration (herein Sp).

[1328] Phosphorodithioates have both non-bridging oxygens replaced by sulfur. The phosphorus center in the phosphorodithioates is achiral which precludes the formation of oligoribonucleotide diastereomers. In certain embodiments, modifications to one or both non-bridging oxygens can also include the replacement of the non-bridging oxygens with a group independently selected from S, Se, B, C, H, N, and OR (R can be, e.g., alkyl or aryl).

[1329] The phosphate linker can also be modified by replacement of a bridging oxygen, (i.e., the oxygen that links the phosphate to the nucleoside), with nitrogen (bridged phosphoroamidates), sulfur (bridged phosphorothioates) and carbon (bridged methylenephosphonates). The replacement can occur at either linking oxygen or at both of the linking oxygens.

[1330] 14.2.2 Replacement of the Phosphate Group

[1331] The phosphate group can be replaced by non-phosphorus containing connectors. In certain embodiments, the charge phosphate group can be replaced by a neutral moiety.

[1332] Examples of moieties which can replace the phosphate group can include, without limitation, e.g., methyl phosphonate, hydroxylamino, siloxane, carbonate, carboxymethyl, carbamate, amide, thioether, ethylene oxide linker, sulfonate, sulfonamide, thioformacetal, formacetal, oxime, methyleneimino, methylenemethylimino, methylenehydrazo, methylenedimethylhydrazo and methyleneoxymethylimino.

[1333] 14.2.3 Replacement of the Ribophosphate Backbone

[1334] Scaffolds that can mimic nucleic acids can also be constructed wherein the phosphate linker and ribose sugar are replaced by nuclease resistant nucleoside or nucleotide surrogates. In certain embodiments, the nucleobases can be tethered by a surrogate backbone. Examples can include, without limitation, the morpholino, cyclobutyl, pyrrolidine and peptide nucleic acid (PNA) nucleoside surrogates.

[1335] 14.3 Sugar Modifications

[1336] The modified nucleosides and modified nucleotides can include one or more modifications to the sugar group. For example, the 2′ hydroxyl group (OH) can be modified or replaced with a number of different “oxy” or “deoxy” substituents. In certain embodiments, modifications to the 2′ hydroxyl group can enhance the stability of the nucleic acid since the hydroxyl can no longer be deprotonated to form a 2′-alkoxide ion. The 2′-alkoxide can catalyze degradation by intramolecular nucleophilic attack on the linker phosphorus atom.

[1337] Examples of “oxy”-2′ hydroxyl group modifications can include alkoxy or aryloxy (OR, wherein “R” can be, e.g., alkyl, cycloalkyl, aryl, aralkyl, heteroaryl or a sugar); polyethyleneglycols (PEG), O(CH₂CH₂O)ₙCH₂CH₂OR wherein R can be, e.g., H or optionally substituted alkyl, and n can be an integer from 0 to 20 (e.g., from 0 to 4, from 0 to 8, from 0 to 10, from 0 to 16, from 1 to 4, from 1 to 8, from 1 to 10, from 1 to 16, from 1 to 20, from 2 to 4, from 2 to 8, from 2 to 10, from 2 to 16, from 2 to 20, from 4 to 8, from 4 to 10, from 4 to 16, and from 4 to 20). In certain embodiments, the “oxy”-2′ hydroxyl group modification can include “locked” nucleic acids (LNA) in which the 2′ hydroxyl can be connected, e.g., by a C₁₋₆ alkylene or C₁₋₆ heteroalkylene bridge, to the 4′ carbon of the same ribose sugar, where exemplary bridges can include methylene, propylene, ether, or amino bridges; O-amino (wherein amino can be, e.g., NH₂; alkylamino, dialkylamino, heterocyclyl, arylamino, diarylamino, heteroarylamino, or diheteroarylamino, ethylenediamine, or polyamino) and aminoalkoxy, O(CH₂)ₙ-amino, (wherein amino can be, e.g., NH₂; alkylamino, dialkylamino, heterocyclyl, arylamino, diarylamino, heteroarylamino, or diheteroarylamino, ethylenediamine, or polyamino). In certain embodiments, the “oxy”-2′ hydroxyl group modification can include the methoxyethyl group (MOE), (OCH₂CH₂OCH₃, e.g., a PEG derivative).

[1338] “Deoxy” modifications can include hydrogen (i.e. deoxyribose sugars, e.g., at the overhang portions of partially ds RNA); halo (e.g., bromo, chloro, fluoro, or iodo); amino (wherein amino can be, e.g., NH₂; alkylamino, dialkylamino, heterocyclyl, arylamino, diarylamino, heteroarylamino, diheteroarylamino, or amino acid); NH(CH₂CH₂NH)ₙCH₂CH₂-amino (wherein amino can be, e.g., as described herein), —NHC(O)R (wherein R can be, e.g., alkyl, cycloalkyl, aryl, aralkyl, heteroaryl or sugar), cyano; mercapto; alkyl-thio-alkyl; thioalkoxy; and alkyl, cycloalkyl, aryl, alkenyl and alkynyl, which may be optionally substituted with e.g., an amino as described herein.

[1339] The sugar group can also contain one or more carbons that possess the opposite stereochemical configuration than that of the corresponding carbon in ribose. Thus, a modified nucleic acid can include nucleotides containing e.g., arabinose, as the sugar. The nucleotide “monomer” can have an alpha linkage at the 1′ position on the sugar, e.g., alpha-nucleosides. The modified nucleic acids can also include “abasic” sugars, which lack a nucleobase at C-1′. These abasic sugars can also be further modified at one or more of the constituent sugar atoms. The modified nucleic acids can also include one or more sugars that are in the L form, e.g. L-nucleosides.

[1340] Generally, RNA includes the sugar group ribose, which is a 5-membered ring having an oxygen. Exemplary modified nucleosides and modified nucleotides can include, without limitation, replacement of the oxygen in ribose (e.g., with sulfur (S), selenium (Se), or alkylene, such as, e.g., methylene or ethylene); addition of a double bond (e.g., to replace ribose with cyclopentenyl or cyclohexenyl); ring contraction of ribose (e.g., to form a 4-membered ring of cyclobutane or oxetane); ring expansion of ribose (e.g., to form a 6- or 7-membered ring having an additional carbon or heteroatom, such as for example, anhydrohexitol, altritol, mannitol, cyclohexanyl, cyclohexenyl, and morpholino that also has a phosphoramidate backbone). In certain embodiments, the modified nucleotides can include multicyclic forms (e.g., tricyclo; and “unlocked” forms, such as glycol nucleic acid (GNA) (e.g., R-GNA or S-GNA, where ribose is replaced by glycol units attached to phosphodiester bonds), threose nucleic acid (TNA, where ribose is replaced with α-L-threofuranosyl-(3′→2′)).

[1341] 14.4 Modifications on the Nucleobase

[1342] The modified nucleosides and modified nucleotides described herein, which can be incorporated into a modified nucleic acid, can include a modified nucleobase. Examples of nucleobases include, but are not limited to, adenine (A), guanine (G), cytosine (C), and uracil (U). These nucleobases can be modified or wholly replaced to provide modified nucleosides and modified nucleotides that can be incorporated into modified nucleic acids. The nucleobase of the nucleotide can be independently selected from a purine, a pyrimidine, a purine or pyrimidine analog. In certain embodiments, the nucleobase can include, for example, naturally-occurring and synthetic derivatives of a base.

[1343] 14.4.1 Uracil

[1344] In certain embodiments, the modified nucleobase is a modified uracil. Exemplary nucleobases and nucleosides having a modified uracil include without limitation pseudouridine (ψ), pyridin-4-one ribonucleoside, 5-aza-uridine, 6-aza-uridine, 2-thio-5-aza-uridine, 2-thio-uridine (s2U), 4-thio-uridine (s4U), 4-thio-pseudouridine, 2-thio-pseudouridine, 5-hydroxy-uridine (ho⁵U), 5-aminoallyl-uridine, 5-halo-uridine (e.g., 5-iodo-uridine or 5-bromo-uridine), 3-methyl-uridine (m³U), 5-methoxy-uridine (mo⁵U), uridine 5-oxyacetic acid (cmo⁵U), uridine 5-oxyacetic acid methyl ester (mcmo⁵U), 5-carboxymethyl-uridine (cm⁵U), 1-carboxymethyl-pseudouridine, 5-carboxyhydroxymethyl-uridine (chm⁵U), 5-carboxyhydroxymethyl-uridine methyl ester (mchm⁵U), 5-methoxycarbonylmethyl-uridine (mcm⁵U), 5-methoxycarbonylmethyl-2-thio-uridine (mcm⁵s2U), 5-aminomethyl-2-thio-uridine (nm⁵s2U), 5-methylaminomethyl-uridine (mnm⁵U), 5-methylaminomethyl-2-thio-uridine (mnm⁵s2U), 5-methylaminomethyl-2-seleno-uridine (mnm⁵se²U), 5-carbamoylmethyl-uridine (ncm⁵U), 5-carboxymethylaminomethyl-uridine (cmnm⁵U), 5-carboxymethylaminomethyl-2-thio-uridine (cmnm ⁵s2U), 5-propynyl-uridine, 1-propynyl-pseudouridine, 5-taurinomethyl-uridine (τcm⁵U), 1-taurinomethyl-pseudouridine, 5-taurinomethyl-2-thio-uridine(τm⁵s2U), 1-taurinomethyl-4-thio-pseudouridine, 5-methyl-uridine (m⁵U, i.e., having the nucleobase deoxythymine), 1-methyl-pseudouridine (m¹ψ), 5-methyl-2-thio-uridine (m⁵s2U), 1-methyl-4-thio-pseudouridine (m¹s⁴ψ), 4-thio-1-methyl-pseudouridine, 3-methyl-pseudouridine (m³ψ), 2-thio-1-methyl-pseudouridine, 1-methyl-1-deaza-pseudouridine, 2-thio-1-methyl-1-deaza-pseudouridine, dihydrouridine (D), dihydropseudouridine, 5,6-dihydrouridine, 5-methyl-dihydrouridine (m⁵D), 2-thio-dihydrouridine, 2-thio-dihydropseudouridine, 2-methoxy-uridine, 2-methoxy-4-thio-uridine, 4-methoxy-pseudouridine, 4-methoxy-2-thio-pseudouridine, N1-methyl-pseudouridine, 3-(3-amino-3-carboxypropyl)uridine (acp³U), 1-methyl-3-(3-amino-3-carboxypropyl)pseudouridine (acp³ψ), 5-(isopentenylaminomethyl)uridine (inm⁵U), 5-(i sopentenylaminomethyl)-2-thio-uridine (inm⁵s2U), a-thio-uridine, 2′-O-methyl-uridine (Um), 5,2′-O-dimethyl-uridine (m⁵Um), 2′-O-methyl-pseudouridine (ψm), 2-thio-2′-O-methyl-uridine (s2Um), 5-methoxycarbonylmethyl-2′-O-methyl-uridine (mcm ⁵Um), 5-carbamoylmethyl-2′-O-methyl-uridine (ncm ⁵Um), 5-carboxymethylaminomethyl-2′-O-methyl-uridine (cmnm ⁵Um), 3,2′-O-dimethyl-uridine (m³Um), 5-(isopentenylaminomethyl)-2′-O-methyl-uridine (inm⁵Um), 1-thio-uridine, deoxythymidine, 2′-F-ara-uridine, 2′-F-uridine, 2′-OH-ara-uridine, 5-(2-carbomethoxyvinyl) uridine, 5-[3-(1-E-propenylamino)uridine, pyrazolo[3,4-d]pyrimidines, xanthine, and hypoxanthine.

[1345] 4.4.2 Cytosine

[1346] In certain embodiments, the modified nucleobase is a modified cytosine. Exemplary nucleobases and nucleosides having a modified cytosine include without limitation 5-aza-cytidine, 6-aza-cytidine, pseudoisocytidine, 3-methyl-cytidine (m³C), N4-acetyl-cytidine (act), 5-formyl-cytidine (f⁵C), N4-methyl-cytidine (m⁴C), 5-methyl-cytidine (m⁵C), 5-halo-cytidine (e.g., 5-iodo-cytidine), 5-hydroxymethyl-cytidine (hm⁵C), 1-methyl-pseudoisocytidine, pyrrolo-cytidine, pyrrolo-pseudoisocytidine, 2-thio-cytidine (s2C), 2-thio-5-methyl-cytidine, 4-thio-pseudoisocytidine, 4-thio-1-methyl-pseudoi socytidine, 4-thio-1-methyl-1-deaza-pseudoisocytidine, 1-methyl-1-deaza-pseudoisocytidine, zebularine, 5-aza-zebularine, 5-methyl-zebularine, 5-aza-2-thio-zebularine, 2-thio-zebularine, 2-methoxy-cytidine, 2-methoxy-5-methyl-cytidine, 4-methoxy-pseudoisocytidine, 4-methoxy-1-methyl-pseudoisocytidine, lysidine (k²C), α-thio-cytidine, 2′-O-methyl-cytidine (Cm), 5,2′-O-dimethyl-cytidine (m⁵Cm), N4-acetyl-2′-O-methyl-cytidine (ac⁴Cm), N4,2′-O-dimethyl-cytidine (m⁴Cm), 5-formyl-2′-O-methyl-cytidine (f ⁵Cm), N4,N4,2′-O-trimethyl-cytidine (m⁴₂Cm), 1-thio-cytidine, 2′-F-ara-cytidine, 2′-F-cytidine, and 2′-OH-ara-cytidine.

[1347] 14.4.3 Adenine

[1348] In certain embodiments, the modified nucleobase is a modified adenine. Exemplary nucleobases and nucleosides having a modified adenine include without limitation 2-amino-purine, 2,6-diaminopurine, 2-amino-6-halo-purine (e.g., 2-amino-6-chloro-purine), 6-halo-purine (e.g., 6-chloro-purine), 2-amino-6-methyl-purine, 8-azido-adenosine, 7-deaza-adenosine, 7-deaza-8-aza-adenosine, 7-deaza-2-amino-purine, 7-deaza-8-aza-2-amino-purine, 7-deaza-2,6-diaminopurine, 7-deaza-8-aza-2,6-diaminopurine, 1-methyl-adenosine (m¹A), 2-methyl-adenosine (m²A), N6-methyl-adenosine (m⁶A), 2-methylthio-N6-methyl-adenosine (ms2m⁶A), N6-isopentenyl-adenosine (i⁶A), 2-methylthio-N6-isopentenyl-adenosine (ms²⁻⁶₁A), N6-(cis-hydroxyisopentenyl)adenosine (io⁶A), 2-methylthio-N6-(cis-hydroxyisopentenyl)adenosine (ms2io⁶A), N6-glycinylcarbamoyl-adenosine (g⁶A), N6-threonylcarbamoyl-adenosine (t⁶A), N6-methyl-N6-threonylcarbamoyl-adenosine (m⁶t⁶A), 2-methylthio-N6-threonylcarbamoyl-adenosine (ms²g⁶A), N6,N6-dimethyl-adenosine (m⁶₂A), N6-hydroxynorvalylcarbamoyl-adenosine (hn⁶A), 2-methylthio-N6-hydroxynorvalylcarbamoyl-adenosine (ms2hn⁶A), N6-acetyl-adenosine (ac⁶A), 7-methyl-adenosine, 2-methylthio-adenosine, 2-methoxy-adenosine, a-thio-adenosine, 2′-O-methyl-adenosine (Am), N⁶,2′-O-dimethyl-adenosine (m⁶Am), N⁶-Methyl-2′-deoxyadenosine, N6,N6,2′-O-trimethyl-adenosine (m⁶₂Am), 1,2′-O-dimethyl-adenosine (m¹Am), 2′-O-ribosyladenosine (phosphate) (Ar(p)), 2-amino-N6-methyl-purine, 1-thio-adenosine, 8-azido-adenosine, 2′-F-ara-adenosine, 2′-F-adenosine, 2′-OH-ara-adenosine, and N6-(19-amino-pentaoxanonadecyl)-adenosine.

[1349] 14.4.4 Guanine

[1350] In certain embodiments, the modified nucleobase is a modified guanine. Exemplary nucleobases and nucleosides having a modified guanine include without limitation inosine (I), 1-methyl-inosine (m¹I), wyosine (imG), methylwyosine (mimG), 4-demethyl-wyosine (imG-14), isowyosine (imG2), wybutosine (yW), peroxywybutosine (o₂yW), hydroxywybutosine (OHyW), undermodified hydroxywybutosine (OHyW*), 7-deaza-guanosine, queuosine (Q), epoxyqueuosine (oQ), galactosyl-queuosine (galQ), mannosyl-queuosine (manQ), 7-cyano-7-deaza-guanosine (preQ₀), 7-aminomethyl-7-deaza-guanosine (preQ₁), archaeosine (G⁺), 7-deaza-8-aza-guanosine, 6-thio-guanosine, 6-thio-7-deaza-guanosine, 6-thio-7-deaza-8-aza-guanosine, 7-methyl-guanosine (m⁷G), 6-thio-7-methyl-guanosine, 7-methyl-inosine, 6-methoxy-guanosine, 1-methyl-guanosine (m′G), N2-methyl-guanosine (m²G), N2,N2-dimethyl-guanosine (m² ₂G), N2,7-dimethyl-guanosine (m²,7G), N2, N2,7-dimethyl-guanosine (m²,2,7G), 8-oxo-guanosine, 7-methyl-8-oxo-guanosine, 1-methyl-6-thio-guanosine, N2-methyl-6-thio-guanosine, N2,N2-dimethyl-6-thio-guanosine, α-thio-guanosine, 2′-O-methyl-guanosine (Gm), N2-methyl-2′-O-methyl-guanosine (m²Gm), N2,N2-dimethyl-2′-O-methyl-guanosine (m²₂Gm), 1-methyl-2′-O-methyl-guanosine (m′Gm), N2,7-dimethyl-2′-O-methyl-guanosine (m²,7Gm), 2′-O-methyl-inosine (Im), 1,2′-O-dimethyl-inosine (m′Im), O⁶-phenyl-2′-deoxyinosine, 2′-O-ribosylguanosine (phosphate) (Gr(p)), 1-thio-guanosine, O⁶-methyl-guanosine, O⁶-Methyl-2′-deoxyguanosine, 2′-F-ara-guanosine, and 2′-F-guanosine.

[1351] 14.5 Exemplary Modified gRNAs

[1352] In certain embodiments, the modified nucleic acids can be modified gRNAs. It is to be understood that any of the gRNAs described herein can be modified in accordance with this section, including any gRNA that comprises a targeting domain comprising a nucleotide sequence selected from SEQ ID NOS: 208 to 8407.

[1353] As discussed above, it was found that the gRNA component of the CRISPR/Cas system (e.g., a CRISPR/Cas9 system) is more efficient at editing genes in certain circulatory cell types (e.g., T cells) ex vivo when it has been modified at or near its 5′ end (e.g., when the 5′ end of a gRNA is modified by the inclusion of a eukaryotic mRNA cap structure or cap analog). In certain embodiments, these and other modified gRNAs described herein exhibit enhanced stability with certain cell types (e.g., circulatory cells, such as T cells) and that this might be responsible for the observed improvements.

[1354] The presently disclosed subject matter encompasses the realization that the improvements observed with a 5′ capped gRNA can be extended to gRNAs that have been modified in other ways to achieve the same type of structural or functional result (e.g., by the inclusion of modified nucleosides or nucleotides, or when an in vitro transcribed gRNA is modified by treatment with a phosphatase such as calf intestinal alkaline phosphatase to remove the 5′ triphosphate group). In certain embodiments, the modified gRNAs described herein may contain one or more modifications (e.g., modified nucleosides or nucleotides) which introduce stability toward nucleases (e.g., by the inclusion of modified nucleosides or nucleotides and/or a 3′ polyA tract).

[1355] Thus, in one aspect, methods, genome editing system and compositions discussed herein provide methods, genome editing system and compositions for gene editing of certain cells (e.g., ex vivo gene editing) by using gRNAs which have been modified at or near their 5′ end (e.g., within 1-10, 1-5, or 1-2 nucleotides of their 5′ end).

[1356] In certain embodiments, the 5′ end of the gRNA molecule lacks a 5′ triphosphate group. In certain embodiments, the 5′ end of the targeting domain lacks a 5′ triphosphate group. In certain embodiments, the 5′ end of the gRNA molecule includes a 5′ cap. In certain embodiments, the 5′ end of the targeting domain includes a 5′ cap. In certain embodiments, the gRNA molecule lacks a 5′ triphosphate group. In certain embodiments, the gRNA molecule comprises a targeting domain and the 5′ end of the targeting domain lacks a 5′ triphosphate group. In certain embodiments, gRNA molecule includes a 5′ cap. In certain embodiments, the gRNA molecule comprises a targeting domain and the 5′ end of the targeting domain includes a 5′ cap.

[1357] In certain embodiments, the 5′ end of a gRNA is modified by the inclusion of a eukaryotic mRNA cap structure or cap analog (e.g., without limitation, a G(5′)ppp(5′)G cap analog, a m7G(5′)ppp(5′)G cap analog, or a 3′-O-Me-m7G(5′)ppp(5′)G anti reverse cap analog (ARCA)). In certain embodiments, the 5′ cap comprises a modified guanine nucleotide that is linked to the remainder of the gRNA molecule via a 5′-5′ triphosphate linkage. In certain embodiments, the 5′ cap analogcomprises two optionally modified guanine nucleotides that are linked via a 5′-5′ triphosphate linkage. In certain embodiments, the 5′ end of the gRNA molecule has the chemical formula:

[chemical structure]

[1358] wherein:
[1359] each of B¹ and B¹′ is independently

[chemical structure]

[1360] each R¹ is independently C₁₋₄ alkyl, optionally substituted by a phenyl or a 6-membered heteroaryl;
[1361] each of R², R²′, and R³′ is independently H, F, OH, or O—C₁₋₄ alkyl;
[1362] each of X, Y, and Z is independently O or S; and
[1363] each of X′ and Y′ is independently O or CH₂.

[1364] In certain embodiments, each R¹ is independently —CH₃, —CH₂CH₃, or —CH₂C₆H₅.

[1365] In certain embodiments, R¹ is —CH₃.

[1366] In certain embodiments, B¹′ is

[chemical structure]

[1367] In certain embodiments, each of R², R²′, and R³′ is independently H, OH, or O—CH₃.

[1368] In certain embodiments, each of X, Y, and Z is O.

[1369] In certain embodiments, X′ and Y′ are O.

[1370] In certain embodiments, the 5′ end of the gRNA molecule has the chemical formula:

[chemical structure]

[1371] In certain embodiments, the 5′ end of the gRNA molecule has the chemical formula:

[chemical structure]

[1372] In certain embodiments, the 5′ end of the gRNA molecule has the chemical formula:

[chemical structure]

[1373] In certain embodiments, the 5′ end of the gRNA molecule has the chemical formula:

[chemical structure]

[1374] In certain embodiments, X is S, and Y and Z are O.

[1375] In certain embodiments, Y is S, and X and Z are O.

[1376] In certain embodiments, Z is S, and X and Y are O.

[1377] In certain embodiments, the phosphorothioate is the Sp diastereomer.

[1378] In certain embodiments, X′ is CH₂, and Y′ is O.

[1379] In certain embodiments, X′ is O, and Y′ is CH₂.

[1380] In certain embodiments, the 5′ cap comprises two optionally modified guanine nucleotides that are linked via an optionally modified 5′-5′ tetraphosphate linkage.

[1381] In certain embodiments, the 5′ end of the gRNA molecule has the chemical formula:

[chemical structure]

[1382] wherein:
[1383] each of B¹ and B¹′ is independently

[chemical structure]

[1384] each R¹ is independently C₁₋₄ alkyl, optionally substituted by a phenyl or a 6-membered heteroaryl;
[1385] each of R², R²′, and R³′ is independently H, F, OH, or O—C₁₋₄ alkyl;
[1386] each of W, X, Y, and Z is independently O or S; and
[1387] each of X′, Y′, and Z′ is independently O or CH₂.

[1388] In certain embodiments, each R¹ is independently —CH₃, —CH₂CH₃, or —CH₂C₆H₅.

[1389] In certain embodiments, R¹ is —CH₃.

[1390] In certain embodiments, B¹′ is

[chemical structure]

[1391] In certain embodiments, each of R², R²′, and R³′ is independently H, OH, or O—CH₃.

[1392] In certain embodiments, each of W, X, Y, and Z is O.

[1393] In certain embodiments, each of X′, Y′, and Z′ are O.

[1394] In certain embodiments, X′ is CH₂, and Y′ and Z′ are O.

[1395] In certain embodiments, Y′ is CH₂, and X′ and Z′ are O.

[1396] In certain embodiments, Z′ is CH₂, and X′ and Y′ are O.

[1397] In certain embodiments, the 5′ cap comprises two optionally modified guanine nucleotides that are linked via an optionally modified 5′-5′ pentaphosphate linkage.

[1398] In certain embodiments, the 5′ end of the gRNA molecule has the chemical formula:

[chemical structure]

[1399] wherein:
[1400] each of B¹ and B¹′ is independently

[chemical structure]

[1401] each R¹ is independently C₁₋₄ alkyl, optionally substituted by a phenyl or a 6-membered heteroaryl;
[1402] each of R², R²′, and R³′ is independently H, F, OH, or O—C₁₋₄ alkyl;
[1403] each of V, W, X, Y, and Z is independently O or S; and
[1404] each of W′, X′, Y′, and Z′ is independently O or CH₂.

[1405] In certain embodiments, each R¹ is independently —CH₃, —CH₂CH₃, or —CH₂C₆H₅.

[1406] In certain embodiments, R¹ is —CH₃.

[1407] In certain embodiments, B¹′ is

[chemical structure]

[1408] In certain embodiments, each of R², R²′, and R³′ is independently H, OH, or O—CH₃.

[1409] In certain embodiments, each of V, W, X, Y, and Z is O.

[1410] In certain embodiments, each of W′, X′, Y′, and Z′ is O.

[1411] As used herein, the term “5′ cap” encompasses traditional mRNA 5′ cap structures but also analogs of these. For example, in addition to the 5′ cap structures that are encompassed by the chemical structures shown above, one may use, e.g., tetraphosphate analogs having a methylene-bis(phosphonate) moiety (e.g., see Rydzik, A M et al., (2009) Org Biomol Chem 7(22):4763-76), analogs having a sulfur substitution for a non-bridging oxygen (e.g., see Grudzien-Nogalska, E. et al, (2007) RNA 13(10): 1745-1755), N7-benzylated dinucleoside tetraphosphate analogs (e.g., see Grudzien, E. et al., (2004) RNA 10(9): 1479-1487), or anti-reverse cap analogs (e.g., see U.S. Pat. No. 7,074,596 and Jemielity, J. et al., (2003) RNA 9(9): 1 108-1 122 and Stepinski, J. et al., (2001) RNA 7(10):1486-1495). The present application also encompasses the use of cap analogs with halogen groups instead of OH or OMe (e.g., see U.S. Pat. No. 8,304,529); cap analogs with at least one phosphorothioate (PS) linkage (e.g., see U.S. Pat. No. 8,153,773 and Kowalska, J. et al., (2008) RNA 14(6): 1 1 19-1131); and cap analogs with at least one boranophosphate or phosphoroselenoate linkage (e.g., see U.S. Pat. No. 8,519,110); and alkynyl-derivatized 5′ cap analogs (e.g., see U.S. Pat. No. 8,969,545).

[1412] In general, the 5′ cap can be included during either chemical synthesis or in vitro transcription of the gRNA. In certain embodiments, a 5′ cap is not used and the gRNA (e.g., an in vitro transcribed gRNA) is instead modified by treatment with a phosphatase (e.g., calf intestinal alkaline phosphatase) to remove the 5′ triphosphate group.

[1413] The presently disclosed subject matter also provides for methods, genome editing system and compositions for gene editing by using gRNAs which comprise a 3′ polyA tail (also called a polyA tract herein). Such gRNAs may, for example, be prepared by adding a polyA tail to a gRNA molecule precursor using a polyadenosine polymerase following in vitro transcription of the gRNA molecule precursor. For example, in certain embodiments, a polyA tail may be added enzymatically using a polymerase such as E. coli polyA polymerase (E-PAP). gRNAs including a polyA tail may also be prepared by in vitro transcription from a DNA template. In certain embodiments, a polyA tail of defined length is encoded on a DNA template and transcribed with the gRNA via an RNA polymerase (such as T7 RNA polymerase). gRNAs with a polyA tail may also be prepared by ligating a polyA oligonucleotide to a gRNA molecule precursor following in vitro transcription using an RNA ligase or a DNA ligase with or without a splinted DNA oligonucleotide complementary to the gRNA molecule precursor and the polyA oligonucleotide. For example, in certain embodiments, a polyA tail of defined length is synthesized as a synthetic oligonucleotide and ligated on the 3′ end of the gRNA with either an RNA ligase or a DNA ligase with or without a splinted DNA oligonucleotide complementary to the guide RNA and the polyA oligonucleotide. gRNAs including the polyA tail may also be prepared synthetically, in one or several pieces that are ligated together by either an RNA ligase or a DNA ligase with or without one or more splinted DNA oligonucleotides.

[1414] In certain embodiments, the polyA tail is comprised of fewer than 50 adenine nucleotides, for example, fewer than 45 adenine nucleotides, fewer than 40 adenine nucleotides, fewer than 35 adenine nucleotides, fewer than 30 adenine nucleotides, fewer than 25 adenine nucleotides or fewer than 20 adenine nucleotides. In certain embodiments the polyA tail is comprised of between 5 and 50 adenine nucleotides, for example between 5 and 40 adenine nucleotides, between 5 and 30 adenine nucleotides, between 10 and 50 adenine nucleotides, or between 15 and 25 adenine nucleotides. In certain embodiments, the polyA tail is comprised of about 20 adenine nucleotides.

[1415] The presently disclosed subject matter also provides for methods, genome editing system and compositions for gene editing (e.g., ex vivo gene editing) by using gRNAs which include one or more modified nucleosides or nucleotides that are described herein.

[1416] While some of the exemplary modifications discussed in this section may be included at any position within the gRNA sequence, in certain embodiments, a gRNA comprises a modification at or near its 5′ end (e.g., within 1-10, 1-5, or 1-2 nucleotides of its 5′ end). In certain embodiments, a gRNA comprises a modification at or near its 3′ end (e.g., within 1-10, 1-5, or 1-2 nucleotides of its 3′ end). In certain embodiments, a gRNA comprises both a modification at or near its 5′ end and a modification at or near its 3′ end.

[1417] In certain embodiments, a gRNA molecule (e.g., an in vitro transcribed gRNA) comprises a targeting domain which is complementary with a target domain from a gene expressed in a eukaryotic cell, wherein the gRNA molecule is modified at its 5′ end and comprises a 3′ polyA tail. The gRNA molecule may, for example, lack a 5′ triphosphate group (e.g., the 5′ end of the targeting domain lacks a 5′ triphosphate group). In certain embodiments, a gRNA (e.g., an in vitro transcribed gRNA) is modified by treatment with a phosphatase (e.g., calf intestinal alkaline phosphatase) to remove the 5′ triphosphate group and comprises a 3′ polyA tail as described herein. The gRNA molecule may alternatively include a 5′ cap (e.g., the 5′ end of the targeting domain includes a 5′ cap). In certain embodiments, a gRNA (e.g., an in vitro transcribed gRNA) contains both a 5′ cap structure or cap analog and a 3′ polyA tail as described herein. In certain embodiments, the 5′ cap comprises a modified guanine nucleotide that is linked to the remainder of the gRNA molecule via a 5′-5′ triphosphate linkage. In certain embodiments, the 5′ cap comprises two optionally modified guanine nucleotides that are linked via an optionally modified 5′-5′ triphosphate linkage (e.g., as described above). In certain embodiments, the polyA tail is comprised of between 5 and 50 adenine nucleotides, for example between 5 and 40 adenine nucleotides, between 5 and 30 adenine nucleotides, between 10 and 50 adenine nucleotides, between 15 and 25 adenine nucleotides, fewer than 30 adenine nucleotides, fewer than 25 adenine nucleotides or about 20 adenine nucleotides.

[1418] In certain embodiments, the presently disclosed subject matter provides for a gRNA molecule comprising a targeting domain which is complementary with a target domain from a gene expressed in a eukaryotic cell, wherein the gRNA molecule comprises a 3′ polyA tail which is comprised of fewer than 30 adenine nucleotides (e.g., fewer than 25 adenine nucleotides, between 15 and 25 adenine nucleotides, or about 20 adenine nucleotides). In certain embodiments, these gRNA molecules are further modified at their 5′ end (e.g., the gRNA molecule is modified by treatment with a phosphatase to remove the 5′ triphosphate group or modified to include a 5′ cap as described herein).

[1419] In certain embodiments, gRNAs can be modified at a 3′ terminal U ribose. In certain embodiments, the 5′ end and a 3′ terminal U ribose of the gRNA are modified (e.g., the gRNA is modified by treatment with a phosphatase to remove the 5′ triphosphate group or modified to include a 5′ cap as described herein).

[1420] For example, the two terminal hydroxyl groups of the U ribose can be oxidized to aldehyde groups and a concomitant opening of the ribose ring to afford a modified nucleoside as shown below:

[chemical structure]

[1421] wherein “U” can be an unmodified or modified uridine.

[1422] In certain embodiments, the 3′ terminal U can be modified with a 2′3′ cyclic phosphate as shown below:

[chemical structure]

[1423] wherein “U” can be an unmodified or modified uridine.

[1424] In certain embodiments, the gRNA molecules may contain 3′ nucleotides which can be stabilized against degradation, e.g., by incorporating one or more of the modified nucleotides described herein. In this embodiment, e.g., uridines can be replaced with modified uridines, e.g., 5-(2-amino)propyl uridine, and 5-bromo uridine, or with any of the modified uridines described herein; adenosines, cytidines and guanosines can be replaced with modified adenosines, cytidines and guanosines, e.g., with modifications at the 8-position, e.g., 8-bromo guanosine, or with any of the modified adenosines, cytidines or guanosines described herein.

[1425] In certain embodiments, sugar-modified ribonucleotides can be incorporated into the gRNA, e.g., wherein the 2′ OH-group is replaced by a group selected from H, —OR, —R (wherein R can be, e.g., alkyl, cycloalkyl, aryl, aralkyl, heteroaryl or sugar), halo, —SH, —SR (wherein R can be, e.g., alkyl, cycloalkyl, aryl, aralkyl, heteroaryl or sugar), amino (wherein amino can be, e.g., NH₂; alkylamino, dialkylamino, heterocyclylamino, arylamino, diarylamino, heteroarylamino, diheteroarylamino, or amino acid); or cyano (—CN). In certain embodiments, the phosphate backbone can be modified as described herein, e.g., with a phosphothioate group. In certain embodiments, one or more of the nucleotides of the gRNA can each independently be a modified or unmodified nucleotide including, but not limited to 2′-sugar modified, such as, 2′-O-methyl, 2′-O-methoxyethyl, or 2′-Fluoro modified including, e.g., 2′-F or 2′-O-methyl, adenosine (A), 2′-F or 2′-O-methyl, cytidine (C), 2′-F or 2′-O-methyl, uridine (U), 2′-F or 2′-O-methyl, thymidine (T), 2′-F or 2′-O-methyl, guanosine (G), 2′-O-methoxyethyl-5-methyluridine (Teo), 2′-O-methoxyethyladenosine (Aeo), 2′-O-methoxyethyl-5-methylcytidine (m5Ceo), and any combinations thereof.

[1426] In certain embodiments, a gRNA can include “locked” nucleic acids (LNA) in which the 2′ OH-group can be connected, e.g., by a C1-6 alkylene or C1-6 heteroalkylene bridge, to the 4′ carbon of the same ribose sugar, where exemplary bridges can include methylene, propylene, ether, or amino bridges; O-amino (wherein amino can be, e.g., NH₂; alkylamino, dialkylamino, heterocyclylamino, arylamino, diarylamino, heteroarylamino, or diheteroarylamino, ethylenediamine, or polyamino) and aminoalkoxy or O(CH₂)ₙ-amino (wherein amino can be, e.g., NH₂; alkylamino, dialkylamino, heterocyclylamino, arylamino, diarylamino, heteroarylamino, or diheteroarylamino, ethylenediamine, or polyamino).

[1427] In certain embodiments, a gRNA can include a modified nucleotide which is multicyclic (e.g., tricyclo; and “unlocked” forms, such as glycol nucleic acid (GNA) (e.g., R-GNA or S-GNA, where ribose is replaced by glycol units attached to phosphodiester bonds), or threose nucleic acid (TNA, where ribose is replaced with a-L-threofuranosyl-(3′→2′)).

[1428] Generally, gRNA molecules include the sugar group ribose, which is a 5-membered ring having an oxygen. Exemplary modified gRNAs can include, without limitation, replacement of the oxygen in ribose (e.g., with sulfur (S), selenium (Se), or alkylene, such as, e.g., methylene or ethylene); addition of a double bond (e.g., to replace ribose with cyclopentenyl or cyclohexenyl); ring contraction of ribose (e.g., to form a 4-membered ring of cyclobutane or oxetane); ring expansion of ribose (e.g., to form a 6- or 7-membered ring having an additional carbon or heteroatom, such as for example, anhydrohexitol, altritol, mannitol, cyclohexanyl, cyclohexenyl, and morpholino that also has a phosphoramidate backbone). Although the majority of sugar analog alterations are localized to the 2′ position, other sites are amenable to modification, including the 4′ position. In certain embodiments, a gRNA comprises a 4′-S, 4′-Se or a 4′-C-aminomethyl-2′-O-Me modification.

[1429] In certain embodiments, deaza nucleotides, e.g., 7-deaza-adenosine, can be incorporated into the gRNA. In certain embodiments, O- and N-alkylated nucleotides, e.g., N6-methyl adenosine, can be incorporated into the gRNA. In certain embodiments, one or more or all of the nucleotides in a gRNA molecule are deoxynucleotides.

[1430] 14.6 miRNA Binding Sites

[1431] microRNAs (or miRNAs) are naturally occurring cellular 19-25 nucleotide long noncoding RNAs. They bind to nucleic acid molecules having an appropriate miRNA binding site, e.g., in the 3′ UTR of an mRNA, and down-regulate gene expression. In certain embodiments, this down regulation occurs by either reducing nucleic acid molecule stability or inhibiting translation. An RNA species disclosed herein, e.g., an mRNA encoding Cas9 can comprise an miRNA binding site, e.g., in its 3′UTR. The miRNA binding site can be selected to promote down regulation of expression is a selected cell type. By way of example, the incorporation of a binding site for miR-122, a microRNA abundant in liver, can inhibit the expression of the gene of interest in the liver.

### EXAMPLES

[1432] The following Examples are merely illustrative and are not intended to limit the scope or content of the invention in any way.

### Example 1

### Evaluation of Candidate Guide RNAs (gRNAs)

[1433] The suitability of candidate gRNAs can be evaluated as described in this example. Although described for a chimeric gRNA, the approach can also be used to evaluate modular gRNAs.

[1434] Cloning gRNAs into Vectors

[1435] For each gRNA, a pair of overlapping oligonucleotides is designed and obtained. Oligonucleotides are annealed and ligated into a digested vector backbone containing an upstream U6 promoter and the remaining sequence of a long chimeric gRNA. Plasmid is sequence-verified and prepped to generate sufficient amounts of transfection-quality DNA. Alternate promoters maybe used to drive in vivo transcription (e.g. H1 promoter) or for in vitro transcription (e.g., a T7 promoter).

[1436] Cloning gRNAs in Linear dsDNA Molecule (STITCHR)

[1437] For each gRNA, a single oligonucleotide is designed and obtained. The U6 promoter and the gRNA scaffold (e.g. including everything except the targeting domain, e.g., including sequences derived from the crRNA and tracrRNA, e.g., including a first complementarity domain; a linking domain; a second complementarity domain; a proximal domain; and a tail domain) are separately PCR amplified and purified as dsDNA molecules. The gRNA-specific oligonucleotide is used in a PCR reaction to stitch together the U6 and the gRNA scaffold, linked by the targeting domain specified in the oligonucleotide. Resulting dsDNA molecule (STITCHR product) is purified for transfection. Alternate promoters may be used to drive in vivo transcription (e.g., H1 promoter) or for in vitro transcription (e.g., T7 promoter). Any gRNA scaffold may be used to create gRNAs compatible with Cas9s from any bacterial species.

[1438] Initial gRNA Screen

[1439] Each gRNA to be tested is transfected, along with a plasmid expressing Cas9 and a small amount of a GFP-expressing plasmid into human cells. In preliminary experiments, these cells can be immortalized human cell lines such as 293T, K562 or U205. Alternatively, primary human cells may be used. In this case, cells may be relevant to the eventual therapeutic cell target (e.g., a circulating blood cell, e.g., a T cell (e.g., a CD4+ T cell, a CD8+ T cell, a helper T cell, a regulatory T cell, a cytotoxic T cell, a memory T cell, a T cell precursor or a natural killer T cell)). The use of primary cells similar to the potential therapeutic target cell population may provide important information on gene targeting rates in the context of endogenous chromatin and gene expression.

[1440] Transfection may be performed using lipid transfection (such as Lipofectamine or Fugene) or by electroporation (such as Lonza Nucleofection). Following transfection, GFP expression can be determined either by fluorescence microscopy or by flow cytometry to confirm consistent and high levels of transfection. These preliminary transfections can comprise different gRNAs and different targeting approaches (17-mers, 20-mers, nuclease, dual-nickase, etc.) to determine which gRNAs/combinations of gRNAs give the greatest activity.

[1441] Efficiency of cleavage with each gRNA may be assessed by measuring NHEJ-induced indel formation at the target locus by a T7E1-type assay or by sequencing. Alternatively, other mismatch-sensitive enzymes, such as Cell/Surveyor nuclease, may also be used.

[1442] For the T7E1 assay, PCR amplicons are approximately 500-700 bp with the intended cut site placed asymmetrically in the amplicon. Following amplification, purification and size-verification of PCR products, DNA is denatured and re-hybridized by heating to 95° C. and then slowly cooling. Hybridized PCR products are then digested with T7 Endonuclease I (or other mismatch-sensitive enzyme) which recognizes and cleaves non-perfectly matched DNA. If indels are present in the original template DNA, when the amplicons are denatured and re-annealed, this results in the hybridization of DNA strands harboring different indels and therefore lead to double-stranded DNA that is not perfectly matched. Digestion products may be visualized by gel electrophoresis or by capillary electrophoresis. The fraction of DNA that is cleaved (density of cleavage products divided by the density of cleaved and uncleaved) may be used to estimate a percent NHEJ using the following equation: % NHEJ=(1-(1-fraction cleaved)^{1/2}). The T7E1 assay is sensitive down to about 2-5% NHEJ.

[1443] Sequencing may be used instead of, or in addition to, the T7E1 assay. For Sanger sequencing, purified PCR amplicons are cloned into a plasmid backbone, transformed, miniprepped and sequenced with a single primer. Sanger sequencing may be used for determining the exact nature of indels after determining the NHEJ rate by T7E1.

[1444] Sequencing may also be performed using next generation sequencing techniques. When using next generation sequencing, amplicons may be 300-500 bp with the intended cut site placed asymmetrically. Following PCR, next generation sequencing adapters and barcodes (for example Illumina multiplex adapters and indexes) may be added to the ends of the amplicon, e.g., for use in high throughput sequencing (for example on an Illumina MiSeq). This method allows for detection of very low NHEJ rates.

### Example 2

### Assessment of Gene Targeting by NHEJ

[1445] The gRNAs that induce the greatest levels of NHEJ in initial tests can be selected for further evaluation of gene targeting efficiency. In this case, cells are derived from disease subjects and, therefore, harbor the relevant mutation.

[1446] Following transfection (usually 2-3 days post-transfection,) genomic DNA may be isolated from a bulk population of transfected cells and PCR may be used to amplify the target region. Following PCR, gene targeting efficiency to generate the desired mutations (either knockout of a target gene or removal of a target sequence motif) may be determined by sequencing. For Sanger sequencing, PCR amplicons may be 500-700 bp long. For next generation sequencing, PCR amplicons may be 300-500 bp long. If the goal is to knockout gene function, sequencing may be used to assess what percent of alleles have undergone NHEJ-induced indels that result in a frameshift or large deletion or insertion that would be expected to destroy gene function. If the goal is to remove a specific sequence motif, sequencing may be used to assess what percent of alleles have undergone NHEJ-induced deletions that span this sequence.

### Example 3

### Screening of gRNAs for CCR5

[1447] In order to identify gRNAs with the highest on target NHEJ efficiency, 24 S. pyogenes gRNAs were selected for testing (Table 10). A DNA plasmid comprised of an exemplary gRNA (including the target region and appropriate TRACR sequence) under the control of a U6 promoter was generated by restriction enzyme cloning. This DNA template was subsequently transfected into 293 cells using Lipofectamine 3000 along with a DNA plasmid encoding the appropriate Cas9 downstream of a CMV promoter. Genomic DNA was isolated from the cells 48-72 hours post transfection. To determine the rate of modification at the CCR5 gene, the target region was amplified using a locus PCR with the following primers (CCR5 exon 3 5′ primer: TATCAAGTGTCAAGTCCAATCTATGACATC (SEQ ID NO: 8410); CCR5 exon 3 3′ primer: GGAAATTCTTCCAGAATTGATACTGACTG (SEQ ID NO: 8411). After PCR amplification, a T7E1 assay was performed on the PCR product. Briefly, this assay involves melting the PCR product followed by a re-annealing step. If gene modification has occurred, there can exist double stranded products that are not perfect matches due to some frequency of insertions or deletions. These double stranded products are sensitive to cleavage by a T7 endonuclease 1 enzyme at the site of mismatch. Therefore, the efficiency of cutting by the Cas9/gRNA complex can be determined by analyzing the amount of T7E1 cleavage. The formula that is used to provide a measure of % NHEJ from the T7E1 cutting is the following: 100*(1-((1-(fraction cleaved))\hat{0}0.5)). The results of this analysis are shown in FIG. 9.

TABLE 10

| gRNA | Targeting Domain Sequence |
|---|---|
| CCR5-U1 | GCCUCCGCUCUACUCAC (SEQ ID NO: 230) |
| CCR5-U3 | GCCGCCCAGUGGGACUU (SEQ ID NO: 211) |
| CCR5-U4 | GCAUAGUGAGCCCAGAA (SEQ ID NO: 216) |
| CCR5-U6 | GCCUUUUGCAGUUUAUC (SEQ ID NO: 246) |
| CCR5-U10 | GACAAUCGAUAGGUACC (SEQ ID NO: 233) |
| CCR5-U13 | GACAAGUGUGAUCACUU (SEQ ID NO: 272) |
| CCR5-U14 | GGUACCUAUCGAUUGUC (SEQ ID NO: 248) |
| CCR5-U43 | GCUGCCGCCCAGUGGGACUU (SEQ ID NO: 335) |
| CCR5-U45 | GGUACCUAUCGAUUGUCAGG (SEQ ID NO: 315) |
| CCR5-U47 | GCAGCAUAGUGAGCCCAGAA (SEQ ID NO: 279) |
| CCR5-U49 | GUGAGUAGAGCGGAGGCAGG (SEQ ID NO: 314) |
| CCR5-U52 | AUGUGUCAACUCUUGAC (SEQ ID NO: 231) |
| CCR5-U53 | UUGACAGGGCUCUAUUUUAU (SEQ ID NO: 212) |
| CCR5-U54 | ACAGGGCUCUAUUUUAU (SEQ ID NO: 266) |
| CCR5-U55 | UCAUCCUCCUGACAAUCGAU (SEQ ID NO: 328) |
| CCR5-U56 | UCCUCCUGACAAUCGAU (SEQ ID NO: 209) |
| CCR5-U57 | CCUGACAAUCGAUAGGUACC (SEQ ID NO: 294) |
| CCR5-U58 | GGUGACAAGUGUGAUCACUU (SEQ ID NO: 334) |
| CCR5-U60 | CCAGGUACCUAUCGAUUGUC (SEQ ID NO: 309) |
| CCR5-U61 | ACCUAUCGAUUGUCAGG (SEQ ID NO: 253) |
| CCR5-U62 | UCAGCCUUUUGCAGUUUAUC (SEQ ID NO: 307) |
| CCR5-U64 | CACAUUGAUUUUUUGGC (SEQ ID NO: 243) |
| CCR5-U65 | AGUAGAGCGGAGGCAGG (SEQ ID NO: 252) |
| CCR5-U66 | CCUGCCUCCGCUCUACUCAC (SEQ ID NO: 291) |

### Example 4

### Assessment of Gene Targeting in Hematopoietic Stem Cells

[1448] Transplantation of autologous CD34⁺hematopoietic stem cells (HSCs) that have been genetically modified to prevent expression of the wild-type CCR5 gene product prevents entry of the HIV virus HSC progeny that are normally susceptible to HIV infection (e.g., macrophages and CD4 T-lymphocytes). Clinically, transplantation of HSCs that contain a genetic mutation in the coding sequence for the CCR5 chemokine receptor has been shown to control HIV infection long-term (Hütter et. al, New England Journal of Medicine, 2009; 360(7):692-698). Genome editing with the CRISPR/Cas9 platform precisely alters endogenous gene targets by creating an indel at the targeted cut site that can lead to knock down of gene expression at the edited locus. In this Example, genome editing in human mobilized peripheral blood CD34⁺ HSCs after co-delivery of Cas9 with gRNA targeting the CCR5 locus was evaluated to induce gene editing in CD34⁺ cells.

[1449] Human CD34⁺ HSCs cells from mobilized peripheral blood (AllCells) were thawed into StemSpan Serum-Free Expansion Medium (SFEM™, StemCell Technologies) containing 100 ng/mL each of the following cytokines: human stem cell factor (SCF), thrombopoietin (TPO), and flt-3 ligand (FL) (all from Peprotech). Cells were grown for 3 days in a humidified incubator and 5% CO₂ 20% O₂. On day 3, media was replaced with fresh Stemspan-SFEM™ supplemented with human SCF, TPO, FL and 40 nM of the small molecule UM171(Xcess Bio), a human HSC self-renewal agonist which has been shown to support robust expansion of human HSCs (Fares et. al, Science, 2014; 345(6203):1509-1512). The published use of UM171 involved prolonged exposure of HSCs to the small molecule for ex vivo expansion of HSCs. In the current experiment, HSCs were exposed to UM171 for 2 hours before and 24 hours after delivery of Cas9 and gRNA plasmid DNA. This UM171 treatment protocol was based on pilot studies performed by the inventors that indicated acute pre-treatment with UM171 before lentivirus vector mediated gene delivery improved HSC viability compared to HSCs treated with vehicle (dimethylsulfoxide, DMSO, Sigma) alone. After the 2-hour pretreatment with UM171, 1 million CD34⁻ HSCs were Nucleofected™ with the Amaxa™ 4D Nucleofector™ device (Lonza), Program EO100 using components of the P3 Primary Cell 4D-Nucleofector Kit™ (Lonza) according to the manufacturer's instructions. Briefly, one million cells were suspended in Nucleofector™ solution and the following amounts of plasmid DNA were added to the cell suspension: 1250 ng plasmid expressing CCR5 gRNA (CCR5-U43) from the human U6 promoter and 3750 ng plasmid expressing wild-type S. pyogenes Cas 9 transcriptionally regulated by the CMV promoter. After Nucleofection™, cells were plated into Stemspan-SFEM™ supplemented with SCF, TPO, FL and 40 nM UM171. After overnight incubation, HSCs were plated in Stemspan-SFEM™ plus cytokines without UM171. At 96 hours after Nucleofection™, CD34⁺ cells were counted for by trypan blue exclusion and divided into 3 portions for the following analyses: a) flow cytometry analysis for assessment of viability by co-staining with 7-Aminoactinomycin-D (7-AAD) and allophycocyanin (APC)-conjugated Annexin-V antibody (ebioscience); b) flow cytometry analysis for maintenance of HSC phenotype (after co-staining with phycoerythrin (PE)-conjugated anti-human CD34 antibody and fluorescein isothicyanate (FITC)-conjugated anti-human CD90, both from BD Bioscience; c) hematopoietic colony forming cell (CFC) analysis by plating 1500 cells in semi-solid methylcellulose based Methocult medium (StemCell Technologies) that supports differentiation of erythroid and myeloid blood cell colonies from HSCs and serves as a surrogate assay to evaluate HSC multipotency and differentiation potential ex vivo; d) genomic DNA analysis for detection of editing at the CCR5 locus. Genomic DNA was extracted from HSCs 96 hours after Nucleofection™, and CCR5 locus-specific PCR reactions were performed.

[1450] HSCs that were Nucleofected™ with Cas9 and CCR5 gRNA plasmids after pre-treatment with UM171 exhibited >93% viability (7-AAD⁻ AnnexinV⁻) and maintained co-expression of CD34 and CD90, as determined by flow cytometry analysis (FIG. 10). In addition, the UM171-treated Nucleofected™ cells were able to divide, as there was no difference in the total cell number between nucleofected UM171 treated cells and unelectroporated HSCs (Table 11). In contrast, HSCs Nucleofected™ without UM171 pre-treatment had decreased viability and cell did not expand in culture.

[1451] Table 11 shows that UM171 preserved CD34⁺ HSC viability after Nucleofection™ with wild type Cas9 and CCR5-U43 gRNA plasmid DNA (96 hours)

TABLE 11

| | Fold change in cell |
|---|---|
| | number of CD34⁺ cells |
| Condition | (96 hours vs. time 0 cell number) |
| No Nucleofection ™ | 1.6 |
| Nucleofection ™ + UM171 treatment | 1.5 |
| Nucleofection ™ + vehicle treatment | 0.6 |

[1452] In order to detect indels at the CCR5 locus, T7E1 assays were performed on CCR5 locus-specific PCR products that were amplified from genomic DNA samples from Nucleofected™ CD34⁺ HSCs and then percentage of indels detected at the CCR5 locus was calculated. Twenty percent indels was detected in the genomic DNA from CD34⁺ HSCs Nucleofected™ with Cas9 and CCR5 gRNA plasmids after pre-treatment with UM171.

[1453] To evaluate maintenance of HSC potency and differentiation potential, two weeks after plating CD34⁺ HSCs in CFC assays, hematopoietic activity was quantified based on scoring the HSC progeny by enumerating the total number of hematopoietic colony forming units (CFU) and the frequencies of specific blood cell phenotypes, including: mixed myeloid/erythroid (Granulocyte-erythroid-monocyte macrophage, CFU-GEMM), myeloid (CFU-macrophage (M), granulocyte-macrophage (CFU-GM)) and erythroid (CFU-E) colonies. CD34⁺ HSCs that were Nucleofected™ after UM171 pre-treatment maintained CFC potential compared to un-Nucleofected™ HSCs (Table 12). In contrast, CD34⁺ HSCs that were Nucleofected™ without UM171 pre-treatment had reduced CFC potential (lower total CFC counts and reduced numbers of mixed-phenotype colonies (CFU-GEMM) and erythroid colonies (CFU-E)) in comparison to un-Nucleofected™ CD34⁺ HSCs.

[1454] Table 12 shows that UM171 preserved CD34⁺ HSC viability after Nucleofection™ with wild-type Cas9 and CCR5 -U43 gRNA plasmid DNA (two weeks).

TABLE 12

| | Number of colony forming units per | | | | | |
|---|---|---|---|---|---|---|
| | 1500 CD34⁺ HSCs plated | | | | | |
| Condition | E | G | M | GM | GEMM | Total |
| No Nucleofaction ™ | 64 | 3 | 88 | 5 | 11 | 171 |
| Nucleofection ™ + UM171 | 92 | 40 | 64 | 32 | 20 | 228 |
| Nucleofaction ™ + vehicle | 18 | 22 | 6 | 1 | 1 | 28 |

[1455] Delivery of co-delivery wild-type S. pyogenes Cas9 and a single CCR5 gRNA plasmid DNA supported 20% genome editing of CD34⁺ HSCs, without loss of cell viability, multipotency, self-renewal and differentiation potential. Pre-treatment and short-term (24-hour) co-culture with the HSC self-renewal agonist UM171 was critical for maintenance of HSC survival and proliferation after Nucleofection™ with Cas9/gRNA DNA. Clinically, transplantation of HSCs that contain a genetic mutation in the CCR5 gene generated by CRISPR/Cas9 related methods can be used to achieve long term control of HIV infection.

### Example 5

### Assessment of Genome Editing at the CXCR4 Genetic Locus in Hematopoietic Stem Cells

[1456] Transplantation of autologous CD34⁺ hematopoietic stem cells (HSCs, also known as hematopoietic stem/progenitor cells or HSPCs) that have been genetically modified to prevent expression of the wild-type CXCR4 gene product prevents entry of the HIV virus HSC progeny that are normally susceptible to HIV infection (e.g., macrophages and CD4 T-lymphocytes). Genome editing with the CRISPR/Cas9 platform precisely alters endogenous gene targets by creating an indel at the targeted cut site that can lead to knock down of gene expression at the edited locus. In this Example, genome editing in human mobilized peripheral blood CD34⁺ HSCs after co-delivery of Cas9 with gRNA targeting the CXCR4 locus was evaluated to induce gene editing in CD34⁺ cells. Streptococcus pyogenes (S. pyogenes) and Staphylococcus aureus (S. aureus) Cas9 variants paired with CXCR4 gRNAs were used in this example.

[1457] Human CD34⁺ HSCs cells from mobilized peripheral blood (AllCells) were thawed into StemSpan Serum-Free Expansion Medium (SFEM, StemCell Technologies) containing 100 ng/mL each of the following cytokines: human stem cell factor (SCF), thrombopoietin (TPO), and flt-3 ligand (FL) (all from Peprotech). Cells were grown for 3 days in a humidified incubator and 5% CO₂ 20% O₂. On day 3, media was replaced with fresh Stemspan-SFEM supplemented with human SCF, TPO, FL±40 nM of the small molecule UM171 (Xcess Bio), a human HSC self-renewal agonist which has been shown to support robust expansion of human HSCs (Fares et. al, SCIENCE, 2014; 345(6203):1509-1512). The published use of UM171 involved prolonged exposure of HSCs to the small molecule for ex vivo expansion of HSCs. In the current experiment, HSCs were exposed to UM171 for 2 hours before and 24 hours after delivery of Cas9 and gRNA plasmid DNA. This UM171 treatment protocol was based on the pilot studies that indicated acute pre-treatment with UM171 before lentivirus vector mediated gene delivery improved HSC viability compared to HSCs treated with vehicle (dimethysulfoxide, DMSO, Sigma) alone. After the 2-hour pretreatment with UM171, 200,000 CD34⁺ HSCs were Nucleofected™ with the Amaxa™ 4D Nucleofector™ device (Lonza), using components of the P3 Primary Cell 4D-Nucleofector Kit™ (Lonza) according to the manufacturer's instructions. Briefly, 200,000 CD34⁺ cells were suspended in Nucleofector™ solution and the following amounts of plasmid DNA were added to the cell suspension: 250 ng plasmid expressing S. pyogenes CXCR4 gRNA (CXCR4-231; targeting domain sequence: GCGCUUCUGGUGGCCCU) or S. aureus CXCR4 gRNA (CXCR4-836; targeting domain sequence: GCUCCAAGGAAAGCAUAGAGGA) from the human U6 promoter each paired with 750 ng plasmid expressing either wild-type S. pyogenes Cas9 or S. aureus Cas9, each regulated by the CMV promoter. After Nucleofection™, cells were plated into Stemspan-SFEM™ supplemented with SCF, TPO, FL with or without 40 nM UM171. After overnight incubation, HSCs were plated in Stemspan-SFEM™ plus cytokines without UM171. At 96 hours after Nucleofection™, CD34⁺ cells were counted for by trypan blue exclusion and divided into 3 portions for the following analyses: a) flow cytometry analysis for assessment of viability by co-staining with 7-Aminoactinomycin-D (7-AAD) and allophycocyanin (APC)-conjugated Annexin-V antibody (ebioscience); b) flow cytometry analysis for maintenance of HSC phenotype (after co-staining with phycoerythrin (PE)-conjugated anti-human CD34 antibody and fluorescein isothicyanate (FITC)-conjugated anti-human CD90, both from BD Bioscience; c) hematopoietic colony forming cell (CFC) analysis by plating 1500 cells in semi-solid methylcellulose based Methocult medium (StemCell Technologies) that supports differentiation of erythroid and myeloid blood cell colonies from HSCs and serves as a surrogate assay to evaluate HSC multipotency and differentiation potential ex vivo; d) genomic DNA analysis for detection of editing at the CXCR4 locus. Genomic DNA was extracted from HSCs 96 hours after Nucleofection™, and CXCR4 locus-specific PCR reactions were performed.

[1458] HSCs that were Nucleofected™ with Cas9 and CXCR4 gRNA (CXCR4-231) plasmids after pre-treatment with UM171 exhibited >95% viability (7-AAD⁻ AnnexinV⁻) and maintained co-expression of CD34 and CD90, as determined by flow cytometry analysis. In addition, the UM171-treated Nucleofected™ cells proliferated, as there was an increase in cell number similar to the level achieved with unelectroporated HSCs (FIG. 11A). In contrast, HSCs Nucleofected™ without UM171 pre-treatment had decreased viability and the cell number decreased in culture relative to untreated control cells.

[1459] In order to detect indels at the CXCR4 locus, T7E1 assays were performed on CXCR4 locus-specific PCR products that were amplified from genomic DNA samples from Nucleofected™ CD34⁺ HSCs and then calculated the percentage of NHEJ detected at the CXCR4 locus (FIG. 11B). HSCs pre-treated with UM171 exhibited a higher fold-expansion and higher percentage of genome editing at the CXCR4 locus after delivery of S. aureus or S. pyogenes Cas9 and CXCR4 gRNAs compared to HSCs that were not pre-treated with UM171.

[1460] To evaluate maintenance of HSC potency and differentiation potential, two weeks after plating CD34⁺ HSCs in CFC assays, hematopoietic activity was quantified based on scoring the HSC progeny by enumerating the total number of hematopoietic colony forming units (CFU) and the frequencies of specific blood cell phenotypes, including: mixed myeloid/erythroid (Granulocyte-erythroid-monocyte macrophage, CFU-GEMM), myeloid (CFU-macrophage (M), granulocyte-macrophage (CFU-GM)) and erythroid (CFU-E) colonies. CD34⁺ HSCs that were pre-treated with UM171 and Nucleofected™ with either S. aureus Cas9 and CXCR4-836 gRNA or S. pyogenes Cas9 and CXCR4-231 gRNA maintained CFC potential compared to un-Nucleofected™ HSCs (Table 13). In contrast, CD34⁺ HSCs that were Nucleofected™ with either Cas9 variant paired with CXCR4 gRNA without UM171 pre-treatment had reduced CFC potential (lower total CFC counts and reduced numbers of mixed-phenotype colonies (CFU-GEMM) and erythroid colonies (CFU-E) in comparison to un-Nucleofected™ CD34⁺ HSCs.

TABLE 13
UM171 preserves CD34⁺ HSC viability after Nucleofection ™
S. aureus (Sa) Cas9 and S. pyogenes (Spy) Cas9
paired with CXCR4 gRNA plasmid DNA (two weeks).

| | Number of colony forming units per | | | | | |
|---|---|---|---|---|---|---|
| | 1500 CD34⁺ HSCs plated | | | | | |
| Condition | E | G | M | GM | GEMM | Total |
| No Nucleofection ™ | 64 | 3 | 88 | 5 | 11 | 171 |
| Sa Cas9 + CXCR4-836 gRNA | 67 | 45 | 29 | 19 | 19 | 212 |
| Nucleofection ™ + UM171 | | | | | | |
| Spy Cas9 + CXCR4-231 gRNA | 60 | 29 | 61 | 27 | 13 | 173 |
| Nucleofection ™ + UM171 | | | | | | |
| Sa Cas9 + CXCR4-836 gRNA | 13 | 1 | 6 | 1 | 0 | 2 |
| Nucleofection ™ + vehicle | | | | | | |
| Spy Cas9 + CXCR4-231 gRNA | 12 | 2 | 4 | 2 | 2 | 1 |
| Nucleofection ™ + vehicle | | | | | | |

[1461] Co-delivery wild-type S. pyogenes Cas9 and CXCR4-231 gRNA plasmid DNA or S. aureus Cas9 and CXCR4-836 gRNA supported up to 25% genome editing of CD34⁺ HSCs, without loss of cell viability, multipotency, self-renewal and differentiation potential. Pre-treatment and short-term (24-hour) co-culture with the HSC self-renewal agonist UM171 was critical for maintenance of HSC survival and proliferation after Nucleofection™ with Cas9/gRNA DNA. Clinically, transplantation of HSCs that contain a genetic mutation in the CXCR4 gene generated by CRISPR/Cas9 related methods could be used to achieve long-term control of HIV infection.

### Example 6

### Assessment of Multiplex Gene Targeting at the Ccr5 and Cxcr4 Genetic Loci in Hematopoietic Stem Cells

[1462] Transplantation of autologous CD34⁺ hematopoietic stem cells (HSCs, also known as hematopoietic stem/progenitor cells or HSPCs) that have been genetically modified to prevent expression of the wild-type CXCR4 or the CCR5 gene product prevents entry of the HIV virus HSC progeny that are normally susceptible to HIV infection (e.g., macrophages and CD4 T-lymphocytes). Multiplex genome editing with the CRISPR/Cas9 platform precisely alters more than one endogenous gene targets by creating indels at two different cut sites can lead to knock down of gene expression at multiple edited loci. In this Example, multiplex genome editing in human mobilized peripheral blood CD34⁺HSCs after co-delivery of wild-type S. pyogenes Cas9 with one gRNA targeting the CXCR4 locus and one gRNA targeting the CCR5 locus was evaluated to induce multiplex gene editing in CD34⁺ cells.

[1463] Human CD34⁺ HSCs cells from mobilized peripheral blood (AllCells) were thawed into StemSpan Serum-Free Expansion Medium (SFEM™, StemCell Technologies) containing 100 ng/mL each of the following cytokines: human stem cell factor (SCF), thrombopoietin (TPO), and flt-3 ligand (FL) (all from Peprotech). Cells were grown for 3 days in a humidified incubator and 5% CO₂ 20% O₂. On day 3, media was replaced with fresh Stemspan-SFEM™ supplemented with human SCF, TPO, FL and 40 nM of the small molecule UM171(Xcess Bio), a human HSC self-renewal agonist that has been shown to support robust expansion of human HSCs (Fares et. al, Science, 2014; 345(6203):1509-1512). The published use of UM171 involved prolonged exposure of HSCs to the small molecule for ex vivo expansion of HSCs. In the current experiment, HSCs were exposed to UM171 for 2 hours before and 24 hours after delivery of Cas9 and gRNA plasmid DNA. This UM171 treatment protocol was based on the pilot studies that indicated acute pre-treatment with UM171 before lentivirus vector mediated gene delivery improved HSC viability compared to HSCs treated with vehicle (dimethysulfoxide, DMSO, Sigma) alone. After the 2-hour pretreatment with UM171, 200,000 CD34⁺ HSCs were Nucleofected™ with the Amaxa™ 4D Nucleofector™ device (Lonza), using components of the P3 Primary Cell 4D-Nucleofector Kit™ (Lonza) according to the manufacturer's instructions. Briefly, 200,000 CD34⁺ cells were respended in Nucleofector™ solution and the following amounts of plasmid DNA were added to the cell suspension: 250 ng plasmid expressing S. pyogenes CXCR4 gRNA (CXCR4-231) from the human U6 promoter, 250 ng plasmid expressing S. pyogenes CCR5 gRNA (CCR5-43) from the human U6 promoter and 750 ng plasmid expressing wild-type S. pyogenes Cas9 regulated by the CMV promoter. After Nucleofection™, cells were replated into Stemspan-SFEM supplemented with SCF, TPO, FL and UM171. After overnight incubation, HSCs were replated in Stemspan-SFEM™ plus cytokines alone without UM171. At 96 hours after Nucleofection™, CD34⁺ cells were counted by trypan blue exclusion and divided into 3 portions for the following analyses: a) flow cytometry analysis for assessment of viability by co-staining with 7-Aminoactinomycin-D (7-AAD) and allophycocyanin (APC)-conjugated Annexin-V antibody (ebioscience); b) flow cytometry analysis for maintenance of HSC phenotype (after co-staining with phycoerythrin (PE)-conjugated anti-human CD34 antibody and fluorescein isothicyanate (FITC)-conjugated anti-human CD90, both from BD Bioscience; c) hematopoietic colony forming cell (CFC) analysis by plating 1500 cells in semi-solid methylcellulose based Methocult™ medium (StemCell Technologies) that supports differentiation of erythroid and myeloid blood cell colonies from HSCs and serves as a surrogate assay to evaluate HSC multipotency and differentiation potential ex vivo; d) genomic DNA analysis for detection of editing at the CXCR4 and CCR5 loci. Genomic DNA was extracted from HSCs 96 hours after Nucleofection™, and CXCR4 and CCR5 locus-specific PCR reactions were performed.

[1464] HSCs that were Nucleofected™ with Cas9 and CXCR4 (CXCR4-231) and CCR5 (CCR5-43) gRNA plasmids exhibited >90% viability (7-AAD⁻ AnnexinV⁻) and maintained co-expression of CD34 and CD90, as determined by flow cytometry analysis. In addition, Nucleofected™ cells were able to proliferate, as there was an increase in cell number with a fold-expansion similar to the level achieved in unelectroporated HSCs (FIG. 12A).

[1465] In order to detect indels at the CXCR4 and CCR5 loci, T7E1 assays were performed on CXCR4 andCCR5 locus-specific PCR products that were amplified from genomic DNA samples from Nucleofected™ CD34⁺ HSCs and the percentages of indels detected at the CXCR4 and CCR5 genomic loci were calculated. Up to 22% genome editing was detected at the two targeted loci in genomic DNA from CD34⁺ HSCs (FIG. 12B).

[1466] To evaluate maintenance of HSC potency and differentiation potential, two weeks after plating CD34⁺ HSCs in CFC assays, hematopoietic activity was quantified based on scoring the HSC progeny by enumerating the total number of hematopoietic colony forming units (CFU) and the frequencies of specific blood cell phenotypes, including: mixed myeloid/erythroid (Granulocyte-erythroid-monocyte macrophage, CFU-GEMM), myeloid (CFU-macrophage (M), granulocyte-macrophage (CFU-GM)) and erythroid (CFU-E) colonies. CD34⁺ HSCs that were Nucleofected™ CD34⁺ HSCs maintained CFC potential compared to un-Nucleofected™ HSCs (Table 14).

TABLE 14
Hematopoietic colony forming potential of un-Nucleofected ™
and Nucleofected ™ CD34⁺ HSCs (2 weeks).

| | Number of colony forming units per | | | | | |
|---|---|---|---|---|---|---|
| | 1500 CD34⁺ HSCs plated | | | | | |
| Condition | E | G | M | GM | GEMM | Total |
| No Nucleofaction ™ | 64 | 3 | 88 | 5 | 11 | 171 |
| Nucleofaction ™ with | 76 | 41 | 73 | 19 | 8 | 217 |
| S. pyogenes Cas9 + CXCR4 | | | | | | |
| gRNA and CCR5 gRNA | | | | | | |

[1467] Co-delivery wild-type S. pyogenes Cas9, CXCR4 gRNA, and CCR5 gRNA expressing DNA plasmids supported up efficient genome editing at the two targeted loci, without loss of cell viability, multioptency, self-renewal and differentiation potential. Clinically, transplantation of HSCs that contain genetic mutations in both the CCR5 and CXCR4 genes generated by CRISPR/Cas9 related multiplexing methods could be used to achieve long-term control of HIV infection.

### Example 7

### Modification of gRNA by Addition of 5′ Cap and 3′ Poly-A Tail Improves Increases Genome Editing at Target Genetic Loci and Improves CD34+ Cell Viability and Survival

[1468] During virus-host co-evolution, viral RNA capping that mimics capping of mRNA evolved to allow viral RNA to escape detection from the cell's innate immune system (Delcroy et al., 2012, NATURE REVIEWS MICROBIOLOGY, 10:51-65). Toll-like receptors in hematopoietic stem/progenitor cells sense the presence of foreign single and double stranded RNA that can lead to innate immune response, cell senescence, and programmed cell death (Kaj aste-Rudnitski and Naldini, 2015, HUMAN GENE THERAPY, 26:201-209). Results from initial experiments showed that human hematopoietic stem/progenitor cells electroporated with unmodified target specific gRNA and Cas9 mRNA led to reduced cell survival, proliferation potential, multipotency (e.g., loss of erythroid differentiation potential and skewed myeloid differentiation potential) compared to cells electroporated with GFP mRNA alone. In order to address this issue, it was hypothesized that cell senescence and apoptosis was due to the target cell sensing of foreign nucleic acid and induction of an innate immune response and subsequent induction of programmed cell death and loss of proliferative and differentiation potential. Toward optimization of genome editing in hematopoietic/stem progenitor cells and to test this hypothesis, human CD34⁺ cells from mobilized peripheral blood and bone marrow were electroporated (using the Maxcyte device) with S. pyogenes Cas9 mRNA co-delivered with HBB or AAVS1 targeted gRNA in vitro transcribed with or without the addition of a 5′ cap and 3′ poly-A tail. Human CD34⁺ cells that were electroporated with Cas9 paired with a single uncapped and untailed HBB or AAVS1 gRNA exhibited decreased proliferation potential over 3 days in culture compared to cells that were electroporated with the same gRNA sequence that was in vitro transcribed to have a 5′ cap and a 3′ polyA tail (FIG. 13A). Other capped and tailed gRNAs (targeted to HBB, AAVS1, CXCR4, and CCR5 loci) delivered with Cas9 mRNA did not negatively impact HSPC viability, proliferation, or multipotency, as determined by comparison of the fold expansion of total live CD34⁺ cells over three days after delivery. Importantly, there was no difference in the proliferative potential of CD34⁺ cells contacted with capped and tailed gRNA and Cas9 mRNA compared to cells contacted with GFP mRNA or cells that were untreated. Analysis of cell viability (by co-staining with either 7-aminoactinomycin D or propidium iodide with AnnexinV antibody followed by flow cytometry analysis) at seventy-two hours after contacting Cas9 mRNA and gRNAs indicated that cells that contacted capped and tailed gRNAs expanded in culture and maintained viability HSPCs that contacted uncapped and tailed gRNAs exhibited a decrease in viable cell number (FIG. 13B). Viable cells (propidium iodide negative) that contacted capped and tailed gRNAs also maintained expression of the CD34 cell surface marker (FIG. 13C).

[1469] In addition to the improved survival, target cells that contacted capped and tailed AAVS1 specific gRNA also exhibited a higher percentage of on-target genome editing (% indels) compared to cells that contacted Cas9 mRNA and uncapped/untailed gRNAs (FIG. 14A). In addition, a higher level of targeted editing was detected in the progeny of CD34⁺ cells that contacted Cas9 mRNA with capped/tailed gRNA compared to the progeny of CD34⁺ cells that contacted Cas9 mRNA with uncapped/untailed gRNA (FIG. 14A, CFCs). Delivery of uncapped/untailed gRNA also reduced the ex vivo hematopoietic potential of CD34⁺ cells, as determined in colony forming cell (CFC) assays. Cells that contacted uncapped an untailed gRNAs with Cas9 mRNA exhibited a loss in total colony forming potential (e.g., potency) and a reduction in the diversity of colony subtype (e.g. loss of erythroid and progenitor potential and skewing toward myeloid macrophage phenotype in progeny)(FIG. 14B). In contrast, cells that contacted capped and tailed gRNAs maintained CFC potential both with respect to the total number of colonies differentiated from the CD34+ cells and with respect to colony diversity (detected of mixed hematopoietic colonies [GEMMs] and erythroid colonies [E]).

[1470] Next capped and tailed HBB specific gRNAs were co-delivered with either Cas9 mRNA or complexed with Cas9 ribonucleoprotein (RNP) and then electroporated into K562 cells, a erythroleukemia cell line that been shown to mimic certain characteristics of HSPCs. Co-delivery of capped and tailed gRNA with Cas9 mRNA or RNP led to high level of genome editing at the HBB locus, as determined by T7E1 assay analysis of HBB locus PCR products (FIG. 14C). Next, 3 different capped and tailed gRNAs (targeting the HBB, AAVS1, and CXCR4 loci) were co-delivered with S. pyogenes Cas9 mRNA into CD34⁺ cells isolated from umbilical cord blood (CB). Here, different amounts of gRNA (2 or 10 μg gRNA plus 10 μg of S. pyogenes Cas9 mRNA) were electroporated into the cells and the percentages of genome editing evaluated at target loci by T7E1 assay analysis of locus PCR products. In contrast, no cleavage was detected at the HBB locus in the genomic DNA from CB CD34⁺ cells that were electroporated with uncapped and untailed HBB gRNA with Cas9 mRNA. The results indicated that CB CD34⁺ cells electroporated with Cas9 mRNA and capped and tailed gRNAs maintained proliferative potential and colony forming potential. Five to 20% indels were detected at target loci and the amount of capped and tailed gRNA co-delivered with the Cas9 mRNA did not impact the percentage of targeted editing (FIG. 14D).

[1471] A representative gel image of the indicated locus specific PCR products after T7E1 assay was performed shows cleavage at the targeted loci in CB CD34⁺ cells 72 hours after delivery of capped and tailed locus-specific gRNAs (AAVS1, HBB, and CXCR4 gRNAs) co-delivered with S. pyogense Cas9 mRNA by electroporation (Maxcyte device)(FIG. 14F). Importantly, there was no difference in the viability of the cells electroporated with capped and tailed AAVS1-specific gRNA, HBB-specific gRNA, or CXCR4-specific gRNA co-delivered with S. pyogenes Cas9 mRNA compared to cells that did not contact Cas9 mRNA or gRNA (i.e., untreated control). Live cells are indicated by negative staining for 7-AAD and AnnexinV as determined by flow cytometry analysis (bottom left quadrants of flow cytometry plots, FIG. 14G). CB CD34⁺ cells electroporated with capped and tailed AAVS1 specific gRNA, HBB-specific gRNA, or CXCR4-specific gRNA co-delivered with S. pyogenes Cas9 mRNA maintained ex vivo hematopoietic colony forming potential as determined by CFC assays. The representation ex vivo hematopoietic potential in CFC assays for cells that contacted HBB-specific gRNA and Cas9 is shown in FIG. 14E.

### Example 8

### Assessment of Gene Editing by S. aureus Cas9/gRNAs Targeting the Human CCR5 Locus in Human K562 Cells

[1472] To identify gRNAs that efficiently target disruption of the human CCR5 gene, eleven gRNAs were selected from a larger list of gRNAs obtained from in silico prediction of gRNAs with S. aureus specific PAM sequences. In silico predicted gRNAs were tiered according to the strategy described in Section 8. An abbreviated list of eleven gRNAs with the lowest predictive off-target scores were selected for subsequent screening experiments, based on proximity to the naturally occurring de1ta32 mutation in CCR5 that has been associated with resistance to HIV. The target-specific complementary region of the selected list of eleven gRNAs are depicted in Table 15. Table 15 depicts the gRNA target-specific complementary sequences evaluated in Example 8.

TABLE 15

| | | Target-specific complementary |
|---|---|---|
| gRNA ID | Size | sequence |
| CCR5_Sa1 | 22 | GCCUAUAAAAUAGAGCCCUGUC (SEQ ID |
| | | NO: 480) |
| CCR5_Sa2 | 22 | AUACAGUCAGUAUCAAUUCUGG (SEQ ID |
| | | NO: 1000) |
| CCR5_Sa3 | 20 | GUGGUGACAAGUGUGAUCAC (SEQ ID |
| | | NO: 488) |
| CCR5_Sa4 | 24 | CCAUACAGUCAGUAUCAAUUCUGG (SEQ ID |
| | | NO: 1002) |
| CCR5_Sa5 | 24 | AAGCCUAUAA AAUAGAGCCCUGUC (SEQ ID |
| | | NO: 482) |
| CCR5_Sa6 | 24 | UGGGGUGGUG ACAAGUGUGAUCAC (SEQ ID |
| | | NO: 492) |
| CCR5_Sa7 | 22 | GGGUGGUGACAAGUGUGAUCAC (SEQ ID |
| | | NO: 490) |
| CCR5_Sa8 | 18 | GGUGACAAGUGUGAUCAC (SEQ ID |
| | | NO: 486) |
| CCR5_Sa9 | 22 | GCCUUUUGCAGUUUAUCAGGAU (SEQ ID |
| | | NO: 512) |
| CCR5_Sa10 | 24 | GCUCUAUUUUAUAGGCUUCUUCUC (SEQ ID |
| | | NO: 535) |
| CCR5_Sa11 | 24 | GCUCUUCAGCCUUUUGCAGUUUAU (SEQ ID |
| | | NO: 521) |

[1473] A DNA plasmid encoding an S. aureus expression cassette (AF002) and a gRNA-specific STITCHR product, which is a DNA molecule consisting of a U6 promoter driving expression of the chimeric gRNA (i.e., a target-specific complementary sequence and the S. aureus gRNA scaffold), were electroporated into K562 cells using the Amaxa Nucleofector system and the program and protocol for K562 cells per the manufacturer's instructions. In brief, 750 ng S. aureus Cas9 plasmid DNA and 250 ng of STITCHR product were used for each gRNA. Forty-eight and 72 hours after electroporation, gDNA was isolated from nucleofected K562 cells and CCR5 specific PCRs were performed followed by T7E1 endonuclease assay on the CCR5 PCR product to evaluate NHEJ at the target site. Six out of the 11 screened gRNAs led to >20% indels in CCR5 (FIG. 15). From this data set, two gRNAs with the highest activity, CCR5_Sa1 and CCR5_Sa3, which supported about 35% and about 39% indels in K562 cells, respectively, were selected for use in subsequent testing of Cas9 RNP experiments in primary human T lymphocytes and CD34⁺HSCs.

### Example 9

### Assessment of Multiplex Gene Targeting at the Ccr5 and Cxcr4 Genetic Loci in Human T Lymphocytes with S. pyogenes and S. aureus Wild-Type Cas9 and DJOA Nickase Ribonucleoprotein Complexes Delivered by Electroporation

[1474] While transplantation of autologous CD34⁺ HSCs genetically modified to prevent expression of the wild-type CXCR4 or the CCR5 would provide a long-term cure to HIV infection, the myeloablative conditioning associated with HSC transplantation destroys host adaptive immunity until long-term engraftment is achieved until the T cell pool is reconstituted after HSC engraftment is acheived, which can take several months. This delay in adaptive immune reconstitution puts patients at risk for the development of opportunistic infections during the acute phase of early engraftment following HSC transplantation. One strategy to prevent this gap in adaptive immunity and to restore T cell function in HIV infected patients before HSC engraftment is stabilized, is to disrupt expression of HIV co-receptors CCR5 and CXCR4 in uninfected T lymphocytes collected from the patient (when patient is on HAART therapy and viral load is low) during or before collection of HSCs for transplantation. In this clinical scenario, HIV-resistant autologous T cells and HIV-resistant autologous HSCs would be co-infused into the original patient to support both short-term and long-term hematopoietic reconstitution. Alternatively, if a suitable HLA-matched or HLA-identical allogeneic HSC and T cell donor is identified for the patient, then the allogeneic donor T lymphocytes and HSCs could be modified with Cas9 RNP targeting disruption of CXCR4 and/or CCR5 HIV co-receptors to support immune and hematopoietic reconstitution. Electroporation of Cas9 RNPs, in which Cas9 protein is complexed with gRNAs targeting CCR5 and/or CXCR4 into HIV-negative patient T lymphocytes (including long-lived T memory stem cells) would support disruption of the HIV co-receptors leading to HIV resistance. In this Example, single and multiplex genome editing in human T lymphocytes after electroporation of Cas9 RNP targeting the CXCR4 locus, the CCR5 locus, or both simultaneously (multiplexing) was evaluated after electroporation of CXCR4 and CCR5 gRNAs that were in vitro transcribed and modified to have an ARCA cap at the 5′ end and a polyA (20A) tail at the 3′ end. Modified gRNAs compatible with S. pyogenes or S. aureus Cas9 were complexed with wild-type Cas9 protein or D10A nickase (for dual nickase strategy of gene disruption). The sgRNAs, gRNA pairs targeting the same locus, or two sgRNAs targeting different loci (i.e., both CXCR4 and CCR5 multiplexing) tested in this experiment are depicted in Table 16. Table 16 depicts experimental design associated with Example 9 to evaluate gene editing as determined by T7E1 endonuclease assay analysis of the CXCR4 and CCR5 loci after electroporation of primary human T lymphocytes with S. aureus and/or S. pyogenes RNPs.

TABLE 16

| | SEQ ID NO. | | SEQ ID NO. | | | |
|---|---|---|---|---|---|---|
| | for the | | for the | | | |
| | Targeting | | Targeting | | | |
| 1^{st} gRNA | domain of | 2^{nd} gRNA | domain of | Cas9 | % editing | % editing |
| (Species) | 1^{st} gRNA | (Species) | 2^{nd} gRNA | variant | at CXCR4 | at CCR5 |
| CXCR4-371 | 4118 | — | | WT | 3.63 | |
| (S. aureus) | | | | | | |
| CXCR4-836 | 4604 | — | | WT | 38.58 | |
| (S. aureus) | | | | | | |
| CXCR4-231 | 3973 | — | | WT | 14.16 | |
| (S. pyogenes) | | | | | | |
| CCR5_Sa1 | 480 | — | | WT | | 5.61 |
| (S. aureus) | | | | | | |
| CCR5_Sa3 | 488 | — | | WT | | 1.98 |
| (S. aureus) | | | | | | |
| CCR5_U43 | 335 | — | | WT | | 4.02 |
| (S. pyogenes) | | | | | | |
| CCR5_Sa1 | 480 | CCR5_Sa3 | 488 | D10A | | 1.73 |
| (S. aureus) | | (S. aureus) | | | | |
| CCR5_Sa1 | 480 | CCR5_U43 | 335 | WT | 5.33 | 1.56 |
| (S. aureus) | | (S. pyogenes) | | | | |
| CCR5_U43 | 335 | CXCR4-231 | 3973 | WT | 4.54 | 4.17 |
| (S. pyogenes) | | (S. pyogenes) | | | | |
| CCR5_U43 | 335 | CXCR4-836 | 4604 | WT | 18.93 | 2.80 |
| (S. pyogenes) | | (S. aureus) | | | | |
| CCR5_Sa3 | 488 | CXCR4-836 | 4604 | WT | 9.70 | 1.29 |
| (S. aureus) | | (S. aureus) | | | | |
| CCR5_Sa1 | 480 | CXCR4-371 | 4118 | WT | 4.47 | 1.04 |
| (S. aureus) | | (S. aureus) | | | | |

[1475] Human CD4⁺ T lymphocytes were sorted and expanded from umbilical cord blood MNCs and then culture in T cell media (Ex Vivo 15 with L-glutamine and recombinant transferrin w/o phenol red and gentamicin supplemented with 5% human AB serum, 1.6 mg/mL N-acetylcysteine, 2 mM L-alanyl-L-glutamine, human IL7 and IL15). Cells were activated with anti-human CD3 and CD28 immunomagnetic beads and then cultured without beads to expand the activated T cells. For RNP electroporation, 5 μg RNP (for sgRNA experiments) and 10 μg RNPs (5 μg of each RNP×2 for multiplex experiments) were added to 200,000 T lymphocytes. RNP was electroporated into T lymphocytes using the Amaxa Nucleofector system per the manufacturer's instructions. Seventy-two hours after electroporation, cells were collected and analyzed for gene disruption as determined by T7E1 analysis (see Table 16)

[1476] Of the three CXCR4 targets evaluated, at the CXCR4 locus, the S. aureus RNP complexed to CXCR4_836 gRNA was the most effective gRNA in T lymphocytes, with ˜40% gene disruption detected. Of the three CCR5 targeting gRNAs evaluated, the S. aureus RNP complexed to CCR5_Sa1 led to the highest level of gene disruption in this experiment (˜5.5%). A dual D10A nickase approach targeting CCR5, in which CCR5_Sa1and CCR5_Sa3 complexed RNPs were simultaneously electroporated into T lymphocytes led to ˜2% gene disruption of this locus. In addition, CXCR4 andCCR5 targeting RNPs were multiplexed (i.e., co-delivered to human T lymphocytes simultaneously). In four samples in which different target combinations of CXCR4 and CCR5 RNPs were multiplexed, gene disruption was detected at both targeted loci.

[1477] In summary, these data show that S. aureus and S. pyogenes Cas9 RNP complexed to modified gRNAs and electroporated into T lymphocytes supported targeted gene disruption of HIV co-receptors, including multiplex and simultaneous gene editing of CXCR4 and CCR5 within the same cell.

### Example 10

### Assessment of Multiplex Gene Targeting at the CCR5 and CXCR4 Genetic Loci in Human Cord Blood CD34⁺ HSCs with S. pyogenes and S. aureus Wild-Type Cas9 and D10A Nickase Ribonucleoprotein Complexes Delivered by Electroporation.

[1478] Transplantation of autologous CD34⁺ hematopoietic stem cells (HSCs, also known as hematopoietic stem/progenitor cells or HSPCs) that have been edited to disrupt expression of CXCR4 or CCR5 gene products would prevent entry of the HIV virus HSC progeny that are normally susceptible to HIV infection (e.g., macrophages and CD4 T lymphocytes). Multiplex genome editing with the Cas9 RNP complexed to modified gRNAs precisely alters more than one endogenous gene targets by creating indels at two different cut sites can lead to knock down of gene expression at multiple edited loci. In this Example, single target and multiplex genome editing was evaluated in human umbilical cord blood (CB) CD34⁺ cells after electroporation of wild-type S. pyogenes Cas9, wild-type S. aureus Cas9 or D10A nickase. Briefly, Cas9 protein was complexed with modified sgRNAs targeting CXCR4 or CCR5. Single RNPs targeting one gene (5 μg each per 200,000 cells either CXCR4 or CCR5) or 2 RNPs (5 μg each both targeting CCR5 or multiplex editing of CXCR4 and CCR5 in the same cells) were electroporated into CD34+ HSCs. Seventy-two hours after electroporation of RNP with the Amaxa nucleofector system, CD34⁺ HSCs were collected, gDNA isolated and CXCR4 and CCR5 PCR products analyzed by T7E1 endonuclease assay to evaluate targeted disruption of these HIV co-receptors (Table 19). Table 19 depicts experimental design associated with Example 10 to evaluate gene editing determined by T7E1 endonuclease assay analysis of the at CXCR4 and CCR5 loci after electroporation of primary human CD34⁺ HSCs with S. aureus and/or S. pyogenes RNPs.

TABLE 19
Cas9 RNP mediated gene editing of CXCR4 and
CCR5 loci human CD34⁺ HSCs

| | | | | % |
|---|---|---|---|---|
| gRNA 1 | gRNA 2 | Cas9 | % editing | editing at |
| (Species) | (Species) | variant | at CXCR4 | CCR5 |
| CXCR4_371 | — | WT | — | — |
| (S. aureus) | | | | |
| CXCR4_836 | — | WT | 57.1 | — |
| (S. aureus) | | | | |
| CXCR4_231 | — | WT | 20.54 | — |
| (S. pyogenes) | | | | |
| CCR5_Sa1 | — | WT | — | 8.75 |
| (S. aureus) | | | | |
| CCR5_Sa3 | — | WT | — | 0.44 |
| (S. aureus) | | | | |
| CCR5_U43 | — | WT | — | 3.68 |
| (S. pyogenes) | | | | |
| CCR5_Sa1 | CCR5_Sa3 | D10A | — | 0.30 |
| (S. aureus) | (S. aureus) | | | |
| CCR5_U43 | CXCR4_231 | WT | 9.84 | 4.36 |
| (S. pyogenes) | (S. pyogenes) | | | |
| CCR5_Sa1 | CXCR4_836 | WT | 39.04 | 5.24 |
| (S. aureus) | (S. aureus) | | | |
| CCR5_Sa3 | CXCR4_836 | WT | 34.82 | 0.35 |
| (S. aureus) | (S. aureus) | | | |
| CCR5_Sa1 | CXCR4_371 | WT | 0.00 | 5.48 |
| (S. aureus) | (S. aureus) | | | |

[1479] Of the three CXCR4 targets evaluated, at the CXCR4 locus, the S. aureus RNP complexed to CXCR4_836 gRNA was the most effective gRNA in HSCs, with 57% gene disruption detected by T7E1 endonuclease assay analysis. Indels were also detected after electroporation of S. pyogenes RNP complexed to CXCR4-231 (20% indels). Of the three CCR5 targeting gRNAs evaluated, the S. aureus RNP complexed to CCR5_Sa1 led to the highest level of indels in this experiment in human HSCs (˜9%). A dual D10A nickase approach targeting CCR5, in which CCR5_Sa1 and CCR5_Sa3 complexed RNPs were simultaneously electroporated into HSCs led to <1% indels at this locus. In addition, CXCR4 and CCR5 targeting RNPs were multiplexed (i.e., co-delivered to human HSCs simultaneously). In four samples in which different target combinations of CXCR4 and CCR5 RNPs were multiplexed, gene disruption was detected at both targeted loci in HSCs. For the multiplex experiment, co-electroporation the combination of CCR5_Sa1 complexed to S. aureus RNP and CXCR4_836 gRNA complexed to S. aureus RNP led to 5% indels at CCR5 and 30% indels at CXCR4.

[1480] In summary, these data show that S. aureus and S. pyogenes Cas9 RNP complexed to modified gRNAs and electroporated into human HSCs supported targeted gene disruption of HIV co-receptors, including multiplex and simultaneous gene editing of CXCR4 and CCR5 within the same cell.

### INCORPORATION BY REFERENCE

[1481] All publications, patents, and patent applications mentioned herein are hereby incorporated by reference in their entirety as if each individual publication, patent or patent application was specifically and individually indicated to be incorporated by reference. In case of conflict, the present application, including any definitions herein, will control.

### Equivalents

[1482] Those skilled in the art will recognize, or be able to ascertain using no more than routine experimentation, many equivalents to the specific embodiments of the invention described herein. Such equivalents are intended to be encompassed by the following claims.

The application's sequence listing, which the Patent Office published only in electronic form, follows.

SEQUENCE LISTING (8416 sequences)

SEQ ID NO: 1 - protein, 1345 aa, Streptococcus mutans
  misc_feature (10)..(21): N-terminal RuvC-like domain
  misc_feature (759)..(766): RuvC-like domain
  misc_feature (837)..(863): HNH-like domain
  misc_feature (982)..(989): RuvC-like domain
MKKPYSIGLDIGTNSVGWAVVTDDYKVPAKKMKVLGNTDKSHIEKNLLGALLFDSGNTAEDRRLKRTARRRYTRRRNRILYLQEIFSEEMGKVDDSFFHRLEDSFLVTEDKRGERHPIFGNLEEEVKYHENFPTIYHLRQYLADNPEKVDLRLVYLALAHIIKFRGHFLIEGKFDTRNNDVQRLFQEFLAVYDNTFENSSLQEQNVQVEEILTDKISKSAKKDRVLKLFPNEKSNGRFAEFLKLIVGNQADFKKHFELEEKAPLQFSKDTYEEELEVLLAQIGDNYAELFLSAKKLYDSILLSGILTVTDVGTKAPLSASMIQRYNEHQMDLAQLKQFIRQKLSDKYNEVFSDVSKDGYAGYIDGKTNQEAFYKYLKGLLNKIEGSGYFLDKIEREDFLRKQRTFDNGSIPHQIHLQEMRAIIRRQAEFYPFLADNQDRIEKLLTFRIPYYVGPLARGKSDFAWLSRKSADKITPWNFDEIVDKESSAEAFINRMTNYDLYLPNQKVLPKHSLLYEKFTVYNELTKVKYKTEQGKTAFFDANMKQEIFDGVFKVYRKVTKDKLMDFLEKEFDEFRIVDLTGLDKENKVFNASYGTYHDLCKILDKDFLDNSKNEKILEDIVLTLTLFEDREMIRKRLENYSDLLTKEQVKKLERRHYTGWGRLSAELIHGIRNKESRKTILDYLIDDGNSNRNFMQLINDDALSFKEEIAKAQVIGETDNLNQVVSDIAGSPAIKKGILQSLKIVDELVKIMGHQPENIVVEMARENQFTNQGRRNSQQRLKGLTDSIKEFGSQILKEHPVENSQLQNDRLFLYYLQNGRDMYTGEELDIDYLSQYDIDHIIPQAFIKDNSIDNRVLTSSKENRGKSDDVPSKDVVRKMKSYWSKLLSAKLITQRKFDNLTKAERGGLTDDDKAGFIKRQLVETRQITKHVARILDERFNTETDENNKKIRQVKIVTLKSNLVSNFRKEFELYKVREINDYHHAHDAYLNAVIGKALLGVYPQLEPEFVYGDYPHFHGHKENKATAKKFFYSNIMNFFKKDDVRTDKNGEIIWKKDEHISNIKKVLSYPQVNIVKKVEEQTGGFSKESILPKGNSDKLIPRKTKKFYWDTKKYGGFDSPIVAYSILVIADIEKGKSKKLKTVKALVGVTIMEKMTFERDPVAFLERKGYRNVQEENIIKLPKYSLFKLENGRKRLLASARELQKGNEIVLPNHLGTLLYHAKNIHKVDEPKHLDYVDKHKDEFKELLDVVSNFSKKYTLAEGNLEKIKELYAQNNGEDLKELASSFINLLTFTAIGAPATFKFFDKNIDRKRYTSTTEILNATLIHQSITGLYETRIDLNKLGGD

SEQ ID NO: 2 - protein, 1368 aa, Streptococcus pyogenes [sequence omitted]

SEQ ID NO: 3 - DNA, 4107 bp, Streptococcus pyogenes
atggataaaaagtacagcatcgggctggacatcggtacaaactcagtggggtgggccgtgattacggacgagtacaaggtaccctccaaaaaatttaaagtgctgggtaacacggacagacactctataaagaaaaatcttattggagccttgctgttcgactcaggcgagacagccgaagccacaaggttgaagcggaccgccaggaggcggtataccaggagaaagaaccgcatatgctacctgcaagaaatcttcagtaacgagatggcaaaggttgacgatagctttttccatcgcctggaagaatcctttcttgttgaggaagacaagaagcacgaacggcaccccatctttggcaatattgtcgacgaagtggcatatcacgaaaagtacccgactatctaccacctcaggaagaagctggtggactctaccgataaggcggacctcagacttatttatttggcactcgcccacatgattaaatttagaggacatttcttgatcgagggcgacctgaacccggacaacagtgacgtcgataagctgttcatccaacttgtgcagacctacaatcaactgttcgaagaaaaccctataaatgcttcaggagtcgacgctaaagcaatcctgtccgcgcgcctctcaaaatctagaagacttgagaatctgattgctcagttgcccggggaaaagaaaaatggattgtttggcaacctgatcgccctcagtctcggactgaccccaaatttcaaaagtaacttcgacctggccgaagacgctaagctccagctgtccaaggacacatacgatgacgacctcgacaatctgctggcccagattggggatcagtacgccgatctctttttggcagcaaagaacctgtccgacgccatcctgttgagcgatatcttgagagtgaacaccgaaattactaaagcaccccttagcgcatctatgatcaagcggtacgacgagcatcatcaggatctgaccctgctgaaggctcttgtgaggcaacagctccccgaaaaatacaaggaaatcttctttgaccagagcaaaaacggctacgctggctatatagatggtggggccagtcaggaggaattctataaattcatcaagcccattctcgagaaaatggacggcacagaggagttgctggtcaaacttaacagggaggacctgctgcggaagcagcggacctttgacaacgggtctatcccccaccagattcatctgggcgaactgcacgcaatcctgaggaggcaggaggatttttatccttttcttaaagataaccgcgagaaaatagaaaagattcttacattcaggatcccgtactacgtgggacctctcgcccggggcaattcacggtttgcctggatgacaaggaagtcagaggagactattacaccttggaacttcgaagaagtggtggacaagggtgcatctgcccagtctttcatcgagcggatgacaaattttgacaagaacctccctaatgagaaggtgctgcccaaacattctctgctctacgagtactttaccgtctacaatgaactgactaaagtcaagtacgtcaccgagggaatgaggaagccggcattccttagtggagaacagaagaaggcgattgtagacctgttgttcaagaccaacaggaaggtgactgtgaagcaacttaaagaagactactttaagaagatcgaatgttttgacagtgtggaaatttcaggggttgaagaccgcttcaatgcgtcattggggacttaccatgatcttctcaagatcataaaggacaaagacttcctggacaacgaagaaaatgaggatattctcgaagacatcgtcctcaccctgaccctgttcgaagacagggaaatgatagaagagcgcttgaaaacctatgcccacctcttcgacgataaagttatgaagcagctgaagcgcaggagatacacaggatggggaagattgtcaaggaagctgatcaatggaattagggataaacagagtggcaagaccatactggatttcctcaaatctgatggcttcgccaataggaacttcatgcaactgattcacgatgactctcttaccttcaaggaggacattcaaaaggctcaggtgagcgggcagggagactcccttcatgaacacatcgcgaatttggcaggttcccccgctattaaaaagggcatccttcaaactgtcaaggtggtggatgaattggtcaaggtaatgggcagacataagccagaaaatattgtgatcgagatggcccgcgaaaaccagaccacacagaagggccagaaaaatagtagagagcggatgaagaggatcgaggagggcatcaaagagctgggatctcagattctcaaagaacaccccgtagaaaacacacagctgcagaacgaaaaattgtacttgtactatctgcagaacggcagagacatgtacgtcgaccaagaacttgatattaatagactgtccgactatgacgtagaccatatcgtgccccagtccttcctgaaggacgactccattgataacaaagtcttgacaagaagcgacaagaacaggggtaaaagtgataatgtgcctagcgaggaggtggtgaaaaaaatgaagaactactggcgacagctgcttaatgcaaagctcattacacaacggaagttcgataatctgacgaaagcagagagaggtggcttgtctgagttggacaaggcagggtttattaagcggcagctggtggaaactaggcagatcacaaagcacgtggcgcagattttggacagccggatgaacacaaaatacgacgaaaatgataaactgatacgagaggtcaaagttatcacgctgaaaagcaagctggtgtccgattttcggaaagacttccagttctacaaagttcgcgagattaataactaccatcatgctcacgatgcgtacctgaacgctgttgtcgggaccgccttgataaagaagtacccaaagctggaatccgagttcgtatacggggattacaaagtgtacgatgtgaggaaaatgatagccaagtccgagcaggagattggaaaggccacagctaagtacttcttttattctaacatcatgaatttttttaagacggaaattaccctggccaacggagagatcagaaagcggccccttatagagacaaatggtgaaacaggtgaaatcgtctgggataagggcagggatttcgctactgtgaggaaggtgctgagtatgccacaggtaaatatcgtgaaaaaaaccgaagtacagaccggaggattttccaaggaaagcattttgcctaaaagaaactcagacaagctcatcgcccgcaagaaagattgggaccctaagaaatacgggggatttgactcacccaccgtagcctattctgtgctggtggtagctaaggtggaaaaaggaaagtctaagaagctgaagtccgtgaaggaactcttgggaatcactatcatggaaagatcatcctttgaaaagaaccctatcgatttcctggaggctaagggttacaaggaggtcaagaaagacctcatcattaaactgccaaaatactctctcttcgagctggaaaatggcaggaagagaatgttggccagcgccggagagctgcaaaagggaaacgagcttgctctgccctccaaatatgttaattttctctatctcgcttcccactatgaaaagctgaaagggtctcccgaagataacgagcagaagcagctgttcgtcgaacagcacaagcactatctggatgaaataatcgaacaaataagcgagttcagcaaaagggttatcctggcggatgctaatttggacaaagtactgtctgcttataacaagcaccgggataagcctattagggaacaagccgagaatataattcacctctttacactcacgaatctcggagcccccgccgccttcaaatactttgatacgactatcgaccggaaacggtataccagtaccaaagaggtcctcgatgccaccctcatccaccagtcaattactggcctgtacgaaacacggatcgacctctctcaactgggcggcgactag

SEQ ID NO: 4 - protein, 1388 aa, Streptococcus thermophilus
  misc_feature (10)..(21): N-terminal RuvC-like domain
  misc_feature (760)..(767): RuvC-like domain
  misc_feature (844)..(870): HNH-like domain
  misc_feature (989)..(996): RuvC-like domain
MTKPYSIGLDIGTNSVGWAVTTDNYKVPSKKMKVLGNTSKKYIKKNLLGVLLFDSGITAEGRRLKRTARRRYTRRRNRILYLQEIFSTEMATLDDAFFQRLDDSFLVPDDKRDSKYPIFGNLVEEKAYHDEFPTIYHLRKYLADSTKKADLRLVYLALAHMIKYRGHFLIEGEFNSKNNDIQKNFQDFLDTYNAIFESDLSLENSKQLEEIVKDKISKLEKKDRILKLFPGEKNSGIFSEFLKLIVGNQADFRKCFNLDEKASLHFSKESYDEDLETLLGYIGDDYSDVFLKAKKLYDAILLSGFLTVTDNETEAPLSSAMIKRYNEHKEDLALLKEYIRNISLKTYNEVFKDDTKNGYAGYIDGKTNQEDFYVYLKKLLAEFEGADYFLEKIDREDFLRKQRTFDNGSIPYQIHLQEMRAILDKQAKFYPFLAKNKERIEKILTFRIPYYVGPLARGNSDFAWSIRKRNEKITPWNFEDVIDKESSAEAFINRMTSFDLYLPEEKVLPKHSLLYETFNVYNELTKVRFIAESMRDYQFLDSKQKKDIVRLYFKDKRKVTDKDIIEYLHAIYGYDGIELKGIEKQFNSSLSTYHDLLNIINDKEFLDDSSNEAIIEEIIHTLTIFEDREMIKQRLSKFENIFDKSVLKKLSRRHYTGWGKLSAKLINGIRDEKSGNTILDYLIDDGISNRNFMQLIHDDALSFKKKIQKAQIIGDEDKGNIKEVVKSLPGSPAIKKGILQSIKIVDELVKVMGGRKPESIVVEMARENQYTNQGKSNSQQRLKRLEKSLKELGSKILKENIPAKLSKIDNNALQNDRLYLYYLQNGKDMYTGDDLDIDRLSNYDIDHIIPQAFLKDNSIDNKVLVSSASNRGKSDDVPSLEVVKKRKTFWYQLLKSKLISQRKFDNLTKAERGGLSPEDKAGFIQRQLVETRQITKHVARLLDEKFNNKKDENNRAVRTVKIITLKSTLVSQFRKDFELYKVREINDFHHAHDAYLNAVVASALLKKYPKLEPEFVYGDYPKYNSFRERKSATEKVYFYSNIMNIFKKSISLADGRVIERPLIEVNEETGESVWNKESDLATVRRVLSYPQVNVVKKVEEQNHGLDRGKPKGLFNANLSSKPKPNSNENLVGAKEYLDPKKYGGYAGISNSFTVLVKGTIEKGAKKKITNVLEFQGISILDRINYRKDKLNFLLEKGYKDIELIIELPKYSLFELSDGSRRMLASILSTNNKRGEIHKGNQIFLSQKFVKLLYHAKRISNTINENHRKYVENHKKEFEELFYYILEFNENYVGAKKNGKLLNSAFQSWQNHSIDELCSSFIGPTGSERKGLFELTSRGSAADFEFLGVKIPRYRDYTPSSLLKDATLIHQSVTGLYETRIDLAKLGEG

SEQ ID NO: 5 - protein, 1334 aa, Listeria innocua
  misc_feature (10)..(21): N-terminal RuvC-like domain
  misc_feature (762)..(769): RuvC-like domain
  misc_feature (840)..(866): HNH-like domain
  misc_feature (985)..(992): RuvC-like domain
MKKPYTIGLDIGTNSVGWAVLTDQYDLVKRKMKIAGDSEKKQIKKNFWGVRLFDEGQTAADRRMARTARRRIERRRNRISYLQGIFAEEMSKTDANFFCRLSDSFYVDNEKRNSRHPFFATIEEEVEYHKNYPTIYHLREELVNSSEKADLRLVYLALAHIIKYRGNFLIEGALDTQNTSVDGIYKQFIQTYNQVFASGIEDGSLKKLEDNKDVAKILVEKVTRKEKLERILKLYPGEKSAGMFAQFISLIVGSKGNFQKPFDLIEKSDIECAKDSYEEDLESLLALIGDEYAELFVAAKNAYSAVVLSSIITVAETETNAKLSASMIERFDTHEEDLGELKAFIKLHLPKHYEEIFSNTEKHGYAGYIDGKTKQADFYKYMKMTLENIEGADYFIAKIEKENFLRKQRTFDNGAIPHQLHLEELEAILHQQAKYYPFLKENYDKIKSLVTFRIPYFVGPLANGQSEFAWLTRKADGEIRPWNIEEKVDFGKSAVDFIEKMTNKDTYLPKENVLPKHSLCYQKYLVYNELTKVRYINDQGKTSYFSGQEKEQIFNDLFKQKRKVKKKDLELFLRNMSHVESPTIEGLEDSFNSSYSTYHDLLKVGIKQEILDNPVNTEMLENIVKILTVFEDKRMIKEQLQQFSDVLDGVVLKKLERRHYTGWGRLSAKLLMGIRDKQSHLTILDYLMNDDGLNRNLMQLINDSNLSFKSIIEKEQVTTADKDIQSIVADLAGSPAIKKGILQSLKIVDELVSVMGYPPQTIVVEMARENQTTGKGKNNSRPRYKSLEKAIKEFGSQILKEHPTDNQELRNNRLYLYYLQNGKDMYTGQDLDIHNLSNYDIDHIVPQSFITDNSIDNLVLTSSAGNREKGDDVPPLEIVRKRKVFWEKLYQGNLMSKRKFDYLTKAERGGLTEADKARFIHRQLVETRQITKNVANILHQRFNYEKDDHGNTMKQVRIVTLKSALVSQFRKQFQLYKVRDVNDYHHAHDAYLNGVVANTLLKVYPQLEPEFVYGDYHQFDWFKANKATAKKQFYTNIMLFFAQKDRIIDENGEILWDKKYLDTVKKVMSYRQMNIVKKTEIQKGEFSKATIKPKGNSSKLIPRKTNWDPMKYGGLDSPNMAYAVVIEYAKGKNKLVFEKKIIRVTIMERKAFEKDEKAFLEEQGYRQPKVLAKLPKYTLYECEEGRRRMLASANEAQKGNQQVLPNHLVTLLHHAANCEVSDGKSLDYIESNREMFAELLAHVSEFAKRYTLAEANLNKINQLFEQNKEGDIKAIAQSFVDLMAFNAMGAPASFKFFETTIERKRYNNLKELLNSTIIYQSITGLYESRKRLDD

SEQ ID NO: 6 - protein, 1053 aa, Staphylococcus aureus
MKRNYILGLDIGITSVGYGIIDYETRDVIDAGVRLFKEANVENNEGRRSKRGARRLKRRRRHRIQRVKKLLFDYNLLTDHSELSGINPYEARVKGLSQKLSEEEFSAALLHLAKRRGVHNVNEVEEDTGNELSTKEQISRNSKALEEKYVAELQLERLKKDGEVRGSINRFKTSDYVKEAKQLLKVQKAYHQLDQSFIDTYIDLLETRRTYYEGPGEGSPFGWKDIKEWYEMLMGHCTYFPEELRSVKYAYNADLYNALNDLNNLVITRDENEKLEYYEKFQIIENVFKQKKKPTLKQIAKEILVNEEDIKGYRVTSTGKPEFTNLKVYHDIKDITARKEIIENAELLDQIAKILTIYQSSEDIQEELTNLNSELTQEEIEQISNLKGYTGTHNLSLKAINLILDELWHTNDNQIAIFNRLKLVPKKVDLSQQKEIPTTLVDDFILSPVVKRSFIQSIKVINAIIKKYGLPNDIIIELAREKNSKDAQKMINEMQKRNRQTNERIEEIIRTTGKENAKYLIEKIKLHDMQEGKCLYSLEAIPLEDLLNNPFNYEVDHIIPRSVSFDNSFNNKVLVKQEENSKKGNRTPFQYLSSSDSKISYETFKKHILNLAKGKGRISKTKKEYLLEERDINRFSVQKDFINRNLVDTRYATRGLMNLLRSYFRVNNLDVKVKSINGGFTSFLRRKWKFKKERNKGYKHHAEDALIIANADFIFKEWKKLDKAKKVMENQMFEEKQAESMPEIETEQEYKEIFITPHQIKHIKDFKDYKYSHRVDKKPNRELINDTLYSTRKDDKGNTLIVNNLNGLYDKDNDKLKKLINKSPEKLLMYHHDPQTYQKLKLIMEQYGDEKNPLYKYYEETGNYLTKYSKKDNGPVIKKIKYYGNKLNAHLDITDDYPNSRNKVVKLSLKPYRFDVYLDNGVYKFVTVKNLDVIKKENYYEVNSKCYEEAKKLKKISNQAEFIASFYNNDLIKINGELYRVIGVNNDLLNRIEVNMIDITYREYLENMNDKRPPRIIKTIASKTQSIKKYSTDILGNLYEVKSKKHPQIIKKG

SEQ ID NO: 7 - DNA, 3159 bp, Staphylococcus aureus
atgaaaaggaactacattctggggctggacatcgggattacaagcgtggggtatgggattattgactatgaaacaagggacgtgatcgacgcaggcgtcagactgttcaaggaggccaacgtggaaaacaatgagggacggagaagcaagaggggagccaggcgcctgaaacgacggagaaggcacagaatccagagggtgaagaaactgctgttcgattacaacctgctgaccgaccattctgagctgagtggaattaatccttatgaagccagggtgaaaggcctgagtcagaagctgtcagaggaagagttttccgcagctctgctgcacctggctaagcgccgaggagtgcataacgtcaatgaggtggaagaggacaccggcaacgagctgtctacaaaggaacagatctcacgcaatagcaaagctctggaagagaagtatgtcgcagagctgcagctggaacggctgaagaaagatggcgaggtgagagggtcaattaataggttcaagacaagcgactacgtcaaagaagccaagcagctgctgaaagtgcagaaggcttaccaccagctggatcagagcttcatcgatacttatatcgacctgctggagactcggagaacctactatgagggaccaggagaagggagccccttcggatggaaagacatcaaggaatggtacgagatgctgatgggacattgcacctattttccagaagagctgagaagcgtcaagtacgcttataacgcagatctgtacaacgccctgaatgacctgaacaacctggtcatcaccagggatgaaaacgagaaactggaatactatgagaagttccagatcatcgaaaacgtgtttaagcagaagaaaaagcctacactgaaacagattgctaaggagatcctggtcaacgaagaggacatcaagggctaccgggtgacaagcactggaaaaccagagttcaccaatctgaaagtgtatcacgatattaaggacatcacagcacggaaagaaatcattgagaacgccgaactgctggatcagattgctaagatcctgactatctaccagagctccgaggacatccaggaagagctgactaacctgaacagcgagctgacccaggaagagatcgaacagattagtaatctgaaggggtacaccggaacacacaacctgtccctgaaagctatcaatctgattctggatgagctgtggcatacaaacgacaatcagattgcaatctttaaccggctgaagctggtcccaaaaaaggtggacctgagtcagcagaaagagatcccaaccacactggtggacgatttcattctgtcacccgtggtcaagcggagcttcatccagagcatcaaagtgatcaacgccatcatcaagaagtacggcctgcccaatgatatcattatcgagctggctagggagaagaacagcaaggacgcacagaagatgatcaatgagatgcagaaacgaaaccggcagaccaatgaacgcattgaagagattatccgaactaccgggaaagagaacgcaaagtacctgattgaaaaaatcaagctgcacgatatgcaggagggaaagtgtctgtattctctggaggccatccccctggaggacctgctgaacaatccattcaactacgaggtcgatcatattatccccagaagcgtgtccttcgacaattcctttaacaacaaggtgctggtcaagcaggaagagaactctaaaaagggcaataggactcctttccagtacctgtctagttcagattccaagatctcttacgaaacctttaaaaagcacattctgaatctggccaaaggaaagggccgcatcagcaagaccaaaaaggagtacctgctggaagagcgggacatcaacagattctccgtccagaaggattttattaaccggaatctggtggacacaagatacgctactcgcggcctgatgaatctgctgcgatcctatttccgggtgaacaatctggatgtgaaagtcaagtccatcaacggcgggttcacatcttttctgaggcgcaaatggaagtttaaaaaggagcgcaacaaagggtacaagcaccatgccgaagatgctctgattatcgcaaatgccgacttcatctttaaggagtggaaaaagctggacaaagccaagaaagtgatggagaaccagatgttcgaagagaagcaggccgaatctatgcccgaaatcgagacagaacaggagtacaaggagattttcatcactcctcaccagatcaagcatatcaaggatttcaaggactacaagtactctcaccgggtggataaaaagcccaacagagagctgatcaatgacaccctgtatagtacaagaaaagacgataaggggaataccctgattgtgaacaatctgaacggactgtacgacaaagataatgacaagctgaaaaagctgatcaacaaaagtcccgagaagctgctgatgtaccaccatgatcctcagacatatcagaaactgaagctgattatggagcagtacggcgacgagaagaacccactgtataagtactatgaagagactgggaactacctgaccaagtatagcaaaaaggataatggccccgtgatcaagaagatcaagtactatgggaacaagctgaatgcccatctggacatcacagacgattaccctaacagtcgcaacaaggtggtcaagctgtcactgaagccatacagattcgatgtctatctggacaacggcgtgtataaatttgtgactgtcaagaatctggatgtcatcaaaaaggagaactactatgaagtgaatagcaagtgctacgaagaggctaaaaagctgaaaaagattagcaaccaggcagagttcatcgcctccttttacaacaacgacctgattaagatcaatggcgaactgtatagggtcatcggggtgaacaatgatctgctgaaccgcattgaagtgaatatgattgacatcacttaccgagagtatctggaaaacatgaatgataagcgcccccctcgaattatcaaaacaattgcctctaagactcagagtatcaaaaagtactcaaccgacattctgggaaacctgtatgaggtgaagagcaaaaagcaccctcagattatcaaaaagggc

SEQ ID NO: 8 - DNA, 3159 bp, Staphylococcus aureus
atgaagcggaactacatcctgggcctggacatcggcatcaccagcgtgggctacggcatcatcgactacgagacacgggacgtgatcgatgccggcgtgcggctgttcaaagaggccaacgtggaaaacaacgagggcaggcggagcaagagaggcgccagaaggctgaagcggcggaggcggcatagaatccagagagtgaagaagctgctgttcgactacaacctgctgaccgaccacagcgagctgagcggcatcaacccctacgaggccagagtgaagggcctgagccagaagctgagcgaggaagagttctctgccgccctgctgcacctggccaagagaagaggcgtgcacaacgtgaacgaggtggaagaggacaccggcaacgagctgtccaccaaagagcagatcagccggaacagcaaggccctggaagagaaatacgtggccgaactgcagctggaacggctgaagaaagacggcgaagtgcggggcagcatcaacagattcaagaccagcgactacgtgaaagaagccaaacagctgctgaaggtgcagaaggcctaccaccagctggaccagagcttcatcgacacctacatcgacctgctggaaacccggcggacctactatgagggacctggcgagggcagccccttcggctggaaggacatcaaagaatggtacgagatgctgatgggccactgcacctacttccccgaggaactgcggagcgtgaagtacgcctacaacgccgacctgtacaacgccctgaacgacctgaacaatctcgtgatcaccagggacgagaacgagaagctggaatattacgagaagttccagatcatcgagaacgtgttcaagcagaagaagaagcccaccctgaagcagatcgccaaagaaatcctcgtgaacgaagaggatattaagggctacagagtgaccagcaccggcaagcccgagttcaccaacctgaaggtgtaccacgacatcaaggacattaccgcccggaaagagattattgagaacgccgagctgctggatcagattgccaagatcctgaccatctaccagagcagcgaggacatccaggaagaactgaccaatctgaactccgagctgacccaggaagagatcgagcagatctctaatctgaagggctataccggcacccacaacctgagcctgaaggccatcaacctgatcctggacgagctgtggcacaccaacgacaaccagatcgctatcttcaaccggctgaagctggtgcccaagaaggtggacctgtcccagcagaaagagatccccaccaccctggtggacgacttcatcctgagccccgtcgtgaagagaagcttcatccagagcatcaaagtgatcaacgccatcatcaagaagtacggcctgcccaacgacatcattatcgagctggcccgcgagaagaactccaaggacgcccagaaaatgatcaacgagatgcagaagcggaaccggcagaccaacgagcggatcgaggaaatcatccggaccaccggcaaagagaacgccaagtacctgatcgagaagatcaagctgcacgacatgcaggaaggcaagtgcctgtacagcctggaagccatccctctggaagatctgctgaacaaccccttcaactatgaggtggaccacatcatccccagaagcgtgtccttcgacaacagcttcaacaacaaggtgctcgtgaagcaggaagaaaacagcaagaagggcaaccggaccccattccagtacctgagcagcagcgacagcaagatcagctacgaaaccttcaagaagcacatcctgaatctggccaagggcaagggcagaatcagcaagaccaagaaagagtatctgctggaagaacgggacatcaacaggttctccgtgcagaaagacttcatcaaccggaacctggtggataccagatacgccaccagaggcctgatgaacctgctgcggagctacttcagagtgaacaacctggacgtgaaagtgaagtccatcaatggcggcttcaccagctttctgcggcggaagtggaagtttaagaaagagcggaacaaggggtacaagcaccacgccgaggacgccctgatcattgccaacgccgatttcatcttcaaagagtggaagaaactggacaaggccaaaaaagtgatggaaaaccagatgttcgaggaaaagcaggccgagagcatgcccgagatcgaaaccgagcaggagtacaaagagatcttcatcaccccccaccagatcaagcacattaaggacttcaaggactacaagtacagccaccgggtggacaagaagcctaatagagagctgattaacgacaccctgtactccacccggaaggacgacaagggcaacaccctgatcgtgaacaatctgaacggcctgtacgacaaggacaatgacaagctgaaaaagctgatcaacaagagccccgaaaagctgctgatgtaccaccacgacccccagacctaccagaaactgaagctgattatggaacagtacggcgacgagaagaatcccctgtacaagtactacgaggaaaccgggaactacctgaccaagtactccaaaaaggacaacggccccgtgatcaagaagattaagtattacggcaacaaactgaacgcccatctggacatcaccgacgactaccccaacagcagaaacaaggtcgtgaagctgtccctgaagccctacagattcgacgtgtacctggacaatggcgtgtacaagttcgtgaccgtgaagaatctggatgtgatcaaaaaagaaaactactacgaagtgaatagcaagtgctatgaggaagctaagaagctgaagaagatcagcaaccaggccgagtttatcgcctccttctacaacaacgatctgatcaagatcaacggcgagctgtatagagtgatcggcgtgaacaacgacctgctgaaccggatcgaagtgaacatgatcgacatcacctaccgcgagtacctggaaaacatgaacgacaagaggccccccaggatcattaagacaatcgcctccaagacccagagcattaagaagtacagcacagacattctgggcaacctgtatgaagtgaaatctaagaagcaccctcagatcatcaaaaagggc

SEQ ID NO: 9 - DNA, 3159 bp, Staphylococcus aureus
atgaagcgcaactacatcctcggactggacatcggcattacctccgtgggatacggcatcatcgattacgaaactagggatgtgatcgacgctggagtcaggctgttcaaagaggcgaacgtggagaacaacgaggggcggcgctcaaagaggggggcccgccggctgaagcgccgccgcagacatagaatccagcgcgtgaagaagctgctgttcgactacaaccttctgaccgaccactccgaactttccggcatcaacccatatgaggctagagtgaagggattgtcccaaaagctgtccgaggaagagttctccgccgcgttgctccacctcgccaagcgcaggggagtgcacaatgtgaacgaagtggaagaagataccggaaacgagctgtccaccaaggagcagatcagccggaactccaaggccctggaagagaaatacgtggcggaactgcaactggagcggctgaagaaagacggagaagtgcgcggctcgatcaaccgcttcaagacctcggactacgtgaaggaggccaagcagctcctgaaagtgcaaaaggcctatcaccaacttgaccagtcctttatcgatacctacatcgatctgctcgagactcggcggacttactacgagggtccaggggagggctccccatttggttggaaggatattaaggagtggtacgaaatgctgatgggacactgcacatacttccctgaggagctgcggagcgtgaaatacgcatacaacgcagacctgtacaacgcgctgaacgacctgaacaatctcgtgatcacccgggacgagaacgaaaagctcgagtattacgaaaagttccagattattgagaacgtgttcaaacagaagaagaagccgacactgaagcagattgccaaggaaatcctcgtgaacgaagaggacatcaagggctatcgagtgacctcaacgggaaagccggagttcaccaatctgaaggtctaccacgacatcaaagacattaccgcccggaaggagatcattgagaacgcggagctgttggaccagattgcgaagattctgaccatctaccaatcctccgaggatattcaggaagaactcaccaacctcaacagcgaactgacccaggaggagatagagcaaatctccaacctgaagggctacaccggaactcataacctgagcctgaaggccatcaacttgatcctggacgagctgtggcacaccaacgataaccagatcgctattttcaatcggctgaagctggtccccaagaaagtggacctctcacaacaaaaggagatccctactacccttgtggacgatttcattctgtcccccgtggtcaagagaagcttcatacagtcaatcaaagtgatcaatgccattatcaagaaatacggtctgcccaacgacattatcattgagctcgcccgcgagaagaactcgaaggacgcccagaagatgattaacgaaatgcagaagaggaaccgacagactaacgaacggatcgaagaaatcatccggaccaccgggaaggaaaacgcgaagtacctgatcgaaaagatcaagctccatgacatgcaggaaggaaagtgtctgtactcgctggaggccattccgctggaggacttgctgaacaacccttttaactacgaagtggatcatatcattccgaggagcgtgtcattcgacaattccttcaacaacaaggtcctcgtgaagcaggaggaaaactcgaagaagggaaaccgcacgccgttccagtacctgagcagcagcgactccaagatttcctacgaaaccttcaagaagcacatcctcaacctggcaaaggggaagggtcgcatctccaagaccaagaaggaatatctgctggaagaaagagacatcaacagattctccgtgcaaaaggacttcatcaaccgcaacctcgtggatactagatacgctactcggggtctgatgaacctcctgagaagctactttagagtgaacaatctggacgtgaaggtcaagtcgattaacggaggtttcacctccttcctgcggcgcaagtggaagttcaagaaggaacggaacaagggctacaagcaccacgccgaggacgccctgatcattgccaacgccgacttcatcttcaaagaatggaagaaacttgacaaggctaagaaggtcatggaaaaccagatgttcgaagaaaagcaggccgagtctatgcctgaaatcgagactgaacaggagtacaaggaaatctttattacgccacaccagatcaaacacatcaaggatttcaaggattacaagtactcacatcgcgtggacaaaaagccgaacagggaactgatcaacgacaccctctactccacccggaaggatgacaaagggaataccctcatcgtcaacaaccttaacggcctgtacgacaaggacaacgataagctgaagaagctcattaacaagtcgcccgaaaagttgctgatgtaccaccacgaccctcagacttaccagaagctcaagctgatcatggagcagtatggggacgagaaaaacccgttgtacaagtactacgaagaaactgggaattatctgactaagtactccaagaaagataacggccccgtgattaagaagattaagtactacggcaacaagctgaacgcccatctggacatcaccgatgactaccctaattcccgcaacaaggtcgtcaagctgagcctcaagccctaccggtttgatgtgtaccttgacaatggagtgtacaagttcgtgactgtgaagaaccttgacgtgatcaagaaggagaactactacgaagtcaactccaagtgctacgaggaagcaaagaagttgaagaagatctcgaaccaggccgagttcattgcctccttctataacaacgacctgattaagatcaacggcgaactgtaccgcgtcattggcgtgaacaacgatctcctgaaccgcatcgaagtgaacatgatcgacatcacttaccgggaatacctggagaatatgaacgacaagcgcccgccccggatcattaagactatcgcctcaaagacccagtcgatcaagaagtacagcaccgacatcctgggcaacctgtacgaggtcaaatcgaagaagcacccccagatcatcaagaaggga

SEQ ID NO: 10 - DNA, 3159 bp, Staphylococcus aureus
atgaaaaggaactacattctggggctggccatcgggattacaagcgtggggtatgggattattgactatgaaacaagggacgtgatcgacgcaggcgtcagactgttcaaggaggccaacgtggaaaacaatgagggacggagaagcaagaggggagccaggcgcctgaaacgacggagaaggcacagaatccagagggtgaagaaactgctgttcgattacaacctgctgaccgaccattctgagctgagtggaattaatccttatgaagccagggtgaaaggcctgagtcagaagctgtcagaggaagagttttccgcagctctgctgcacctggctaagcgccgaggagtgcataacgtcaatgaggtggaagaggacaccggcaacgagctgtctacaaaggaacagatctcacgcaatagcaaagctctggaagagaagtatgtcgcagagctgcagctggaacggctgaagaaagatggcgaggtgagagggtcaattaataggttcaagacaagcgactacgtcaaagaagccaagcagctgctgaaagtgcagaaggcttaccaccagctggatcagagcttcatcgatacttatatcgacctgctggagactcggagaacctactatgagggaccaggagaagggagccccttcggatggaaagacatcaaggaatggtacgagatgctgatgggacattgcacctattttccagaagagctgagaagcgtcaagtacgcttataacgcagatctgtacaacgccctgaatgacctgaacaacctggtcatcaccagggatgaaaacgagaaactggaatactatgagaagttccagatcatcgaaaacgtgtttaagcagaagaaaaagcctacactgaaacagattgctaaggagatcctggtcaacgaagaggacatcaagggctaccgggtgacaagcactggaaaaccagagttcaccaatctgaaagtgtatcacgatattaaggacatcacagcacggaaagaaatcattgagaacgccgaactgctggatcagattgctaagatcctgactatctaccagagctccgaggacatccaggaagagctgactaacctgaacagcgagctgacccaggaagagatcgaacagattagtaatctgaaggggtacaccggaacacacaacctgtccctgaaagctatcaatctgattctggatgagctgtggcatacaaacgacaatcagattgcaatctttaaccggctgaagctggtcccaaaaaaggtggacctgagtcagcagaaagagatcccaaccacactggtggacgatttcattctgtcacccgtggtcaagcggagcttcatccagagcatcaaagtgatcaacgccatcatcaagaagtacggcctgcccaatgatatcattatcgagctggctagggagaagaacagcaaggacgcacagaagatgatcaatgagatgcagaaacgaaaccggcagaccaatgaacgcattgaagagattatccgaactaccgggaaagagaacgcaaagtacctgattgaaaaaatcaagctgcacgatatgcaggagggaaagtgtctgtattctctggaggccatccccctggaggacctgctgaacaatccattcaactacgaggtcgatcatattatccccagaagcgtgtccttcgacaattcctttaacaacaaggtgctggtcaagcaggaagagaactctaaaaagggcaataggactcctttccagtacctgtctagttcagattccaagatctcttacgaaacctttaaaaagcacattctgaatctggccaaaggaaagggccgcatcagcaagaccaaaaaggagtacctgctggaagagcgggacatcaacagattctccgtccagaaggattttattaaccggaatctggtggacacaagatacgctactcgcggcctgatgaatctgctgcgatcctatttccgggtgaacaatctggatgtgaaagtcaagtccatcaacggcgggttcacatcttttctgaggcgcaaatggaagtttaaaaaggagcgcaacaaagggtacaagcaccatgccgaagatgctctgattatcgcaaatgccgacttcatctttaaggagtggaaaaagctggacaaagccaagaaagtgatggagaaccagatgttcgaagagaagcaggccgaatctatgcccgaaatcgagacagaacaggagtacaaggagattttcatcactcctcaccagatcaagcatatcaaggatttcaaggactacaagtactctcaccgggtggataaaaagcccaacagagagctgatcaatgacaccctgtatagtacaagaaaagacgataaggggaataccctgattgtgaacaatctgaacggactgtacgacaaagataatgacaagctgaaaaagctgatcaacaaaagtcccgagaagctgctgatgtaccaccatgatcctcagacatatcagaaactgaagctgattatggagcagtacggcgacgagaagaacccactgtataagtactatgaagagactgggaactacctgaccaagtatagcaaaaaggataatggccccgtgatcaagaagatcaagtactatgggaacaagctgaatgcccatctggacatcacagacgattaccctaacagtcgcaacaaggtggtcaagctgtcactgaagccatacagattcgatgtctatctggacaacggcgtgtataaatttgtgactgtcaagaatctggatgtcatcaaaaaggagaactactatgaagtgaatagcaagtgctacgaagaggctaaaaagctgaaaaagattagcaaccaggcagagttcatcgcctccttttacaacaacgacctgattaagatcaatggcgaactgtatagggtcatcggggtgaacaatgatctgctgaaccgcattgaagtgaatatgattgacatcacttaccgagagtatctggaaaacatgaatgataagcgcccccctcgaattatcaaaacaattgcctctaagactcagagtatcaaaaagtactcaaccgacattctgggaaacctgtatgaggtgaagagcaaaaagcaccctcagattatcaaaaagggc

SEQ ID NO: 11 - DNA, 3159 bp, Staphylococcus aureus
atgaaaaggaactacattctggggctggacatcgggattacaagcgtggggtatgggattattgactatgaaacaagggacgtgatcgacgcaggcgtcagactgttcaaggaggccaacgtggaaaacaatgagggacggagaagcaagaggggagccaggcgcctgaaacgacggagaaggcacagaatccagagggtgaagaaactgctgttcgattacaacctgctgaccgaccattctgagctgagtggaattaatccttatgaagccagggtgaaaggcctgagtcagaagctgtcagaggaagagttttccgcagctctgctgcacctggctaagcgccgaggagtgcataacgtcaatgaggtggaagaggacaccggcaacgagctgtctacaaaggaacagatctcacgcaatagcaaagctctggaagagaagtatgtcgcagagctgcagctggaacggctgaagaaagatggcgaggtgagagggtcaattaataggttcaagacaagcgactacgtcaaagaagccaagcagctgctgaaagtgcagaaggcttaccaccagctggatcagagcttcatcgatacttatatcgacctgctggagactcggagaacctactatgagggaccaggagaagggagccccttcggatggaaagacatcaaggaatggtacgagatgctgatgggacattgcacctattttccagaagagctgagaagcgtcaagtacgcttataacgcagatctgtacaacgccctgaatgacctgaacaacctggtcatcaccagggatgaaaacgagaaactggaatactatgagaagttccagatcatcgaaaacgtgtttaagcagaagaaaaagcctacactgaaacagattgctaaggagatcctggtcaacgaagaggacatcaagggctaccgggtgacaagcactggaaaaccagagttcaccaatctgaaagtgtatcacgatattaaggacatcacagcacggaaagaaatcattgagaacgccgaactgctggatcagattgctaagatcctgactatctaccagagctccgaggacatccaggaagagctgactaacctgaacagcgagctgacccaggaagagatcgaacagattagtaatctgaaggggtacaccggaacacacaacctgtccctgaaagctatcaatctgattctggatgagctgtggcatacaaacgacaatcagattgcaatctttaaccggctgaagctggtcccaaaaaaggtggacctgagtcagcagaaagagatcccaaccacactggtggacgatttcattctgtcacccgtggtcaagcggagcttcatccagagcatcaaagtgatcaacgccatcatcaagaagtacggcctgcccaatgatatcattatcgagctggctagggagaagaacagcaaggacgcacagaagatgatcaatgagatgcagaaacgaaaccggcagaccaatgaacgcattgaagagattatccgaactaccgggaaagagaacgcaaagtacctgattgaaaaaatcaagctgcacgatatgcaggagggaaagtgtctgtattctctggaggccatccccctggaggacctgctgaacaatccattcaactacgaggtcgatcatattatccccagaagcgtgtccttcgacaattcctttaacaacaaggtgctggtcaagcaggaagaggcctctaaaaagggcaataggactcctttccagtacctgtctagttcagattccaagatctcttacgaaacctttaaaaagcacattctgaatctggccaaaggaaagggccgcatcagcaagaccaaaaaggagtacctgctggaagagcgggacatcaacagattctccgtccagaaggattttattaaccggaatctggtggacacaagatacgctactcgcggcctgatgaatctgctgcgatcctatttccgggtgaacaatctggatgtgaaagtcaagtccatcaacggcgggttcacatcttttctgaggcgcaaatggaagtttaaaaaggagcgcaacaaagggtacaagcaccatgccgaagatgctctgattatcgcaaatgccgacttcatctttaaggagtggaaaaagctggacaaagccaagaaagtgatggagaaccagatgttcgaagagaagcaggccgaatctatgcccgaaatcgagacagaacaggagtacaaggagattttcatcactcctcaccagatcaagcatatcaaggatttcaaggactacaagtactctcaccgggtggataaaaagcccaacagagagctgatcaatgacaccctgtatagtacaagaaaagacgataaggggaataccctgattgtgaacaatctgaacggactgtacgacaaagataatgacaagctgaaaaagctgatcaacaaaagtcccgagaagctgctgatgtaccaccatgatcctcagacatatcagaaactgaagctgattatggagcagtacggcgacgagaagaacccactgtataagtactatgaagagactgggaactacctgaccaagtatagcaaaaaggataatggccccgtgatcaagaagatcaagtactatgggaacaagctgaatgcccatctggacatcacagacgattaccctaacagtcgcaacaaggtggtcaagctgtcactgaagccatacagattcgatgtctatctggacaacggcgtgtataaatttgtgactgtcaagaatctggatgtcatcaaaaaggagaactactatgaagtgaatagcaagtgctacgaagaggctaaaaagctgaaaaagattagcaaccaggcagagttcatcgcctccttttacaacaacgacctgattaagatcaatggcgaactgtatagggtcatcggggtgaacaatgatctgctgaaccgcattgaagtgaatatgattgacatcacttaccgagagtatctggaaaacatgaatgataagcgcccccctcgaattatcaaaacaattgcctctaagactcagagtatcaaaaagtactcaaccgacattctgggaaacctgtatgaggtgaagagcaaaaagcaccctcagattatcaaaaagggc

SEQ ID NO: 12 - protein, 1082 aa, Neisseria meningitidis
MAAFKPNPINYILGLDIGIASVGWAMVEIDEDENPICLIDLGVRVFERAEVPKTGDSLAMARRLARSVRRLTRRRAHRLLRARRLLKREGVLQAADFDENGLIKSLPNTPWQLRAAALDRKLTPLEWSAVLLHLIKHRGYLSQRKNEGETADKELGALLKGVADNAHALQTGDFRTPAELALNKFEKESGHIRNQRGDYSHTFSRKDLQAELILLFEKQKEFGNPHVSGGLKEGIETLLMTQRPALSGDAVQKMLGHCTFEPAEPKAAKNTYTAERFIWLTKLNNLRILEQGSERPLTDTERATLMDEPYRKSKLTYAQARKLLGLEDTAFFKGLRYGKDNAEASTLMEMKAYHAISRALEKEGLKDKKSPLNLSPELQDEIGTAFSLFKTDEDITGRLKDRIQPEILEALLKHISFDKFVQISLKALRRIVPLMEQGKRYDEACAEIYGDHYGKKNTEEKIYLPPIPADEIRNPVVLRALSQARKVINGVVRRYGSPARIHIETAREVGKSFKDRKEIEKRQEENRKDREKAAAKFREYFPNFVGEPKSKDILKLRLYEQQHGKCLYSGKEINLGRLNEKGYVEIDHALPFSRTWDDSFNNKVLVLGSENQNKGNQTPYEYFNGKDNSREWQEFKARVETSRFPRSKKQRILLQKFDEDGFKERNLNDTRYVNRFLCQFVADRMRLTGKGKKRVFASNGQITNLLRGFWGLRKVRAENDRHHALDAVVVACSTVAMQQKITRFVRYKEMNAFDGKTIDKETGEVLHQKTHFPQPWEFFAQEVMIRVFGKPDGKPEFEEADTPEKLRTLLAEKLSSRPEAVHEYVTPLFVSRAPNRKMSGQGHMETVKSAKRLDEGVSVLRVPLTQLKLKDLEKMVNREREPKLYEALKARLEAHKDDPAKAFAEPFYKYDKAGNRTQQVKAVRVEQVQKTGVWVRNHNGIADNATMVRVDVFEKGDKYYLVPIYSWQVAKGILPDRAVVQGKDEEDWQLIDDSFNFKFSLHPNDLVEVITKKARMFGYFASCHRGTGNINIRIHDLDHKIGKNGILEGIGVKTALSFQKYQIDELGKEIRPCRLKKRPPVR

SEQ ID NO: 13 - DNA, 3249 bp, Neisseria meningitidis
  misc_feature (1)..(3249): Exemplary codon optimized Cas9
atggccgccttcaagcccaaccccatcaactacatcctgggcctggacatcggcatcgccagcgtgggctgggccatggtggagatcgacgaggacgagaaccccatctgcctgatcgacctgggtgtgcgcgtgttcgagcgcgctgaggtgcccaagactggtgacagtctggctatggctcgccggcttgctcgctctgttcggcgccttactcgccggcgcgctcaccgccttctgcgcgctcgccgcctgctgaagcgcgagggtgtgctgcaggctgccgacttcgacgagaacggcctgatcaagagcctgcccaacactccttggcagctgcgcgctgccgctctggaccgcaagctgactcctctggagtggagcgccgtgctgctgcacctgatcaagcaccgcggctacctgagccagcgcaagaacgagggcgagaccgccgacaaggagctgggtgctctgctgaagggcgtggccgacaacgcccacgccctgcagactggtgacttccgcactcctgctgagctggccctgaacaagttcgagaaggagagcggccacatccgcaaccagcgcggcgactacagccacaccttcagccgcaaggacctgcaggccgagctgatcctgctgttcgagaagcagaaggagttcggcaacccccacgtgagcggcggcctgaaggagggcatcgagaccctgctgatgacccagcgccccgccctgagcggcgacgccgtgcagaagatgctgggccactgcaccttcgagccagccgagcccaaggccgccaagaacacctacaccgccgagcgcttcatctggctgaccaagctgaacaacctgcgcatcctggagcagggcagcgagcgccccctgaccgacaccgagcgcgccaccctgatggacgagccctaccgcaagagcaagctgacctacgcccaggcccgcaagctgctgggtctggaggacaccgccttcttcaagggcctgcgctacggcaaggacaacgccgaggccagcaccctgatggagatgaaggcctaccacgccatcagccgcgccctggagaaggagggcctgaaggacaagaagagtcctctgaacctgagccccgagctgcaggacgagatcggcaccgccttcagcctgttcaagaccgacgaggacatcaccggccgcctgaaggaccgcatccagcccgagatcctggaggccctgctgaagcacatcagcttcgacaagttcgtgcagatcagcctgaaggccctgcgccgcatcgtgcccctgatggagcagggcaagcgctacgacgaggcctgcgccgagatctacggcgaccactacggcaagaagaacaccgaggagaagatctacctgcctcctatccccgccgacgagatccgcaaccccgtggtgctgcgcgccctgagccaggcccgcaaggtgatcaacggcgtggtgcgccgctacggcagccccgcccgcatccacatcgagaccgcccgcgaggtgggcaagagcttcaaggaccgcaaggagatcgagaagcgccaggaggagaaccgcaaggaccgcgagaaggccgccgccaagttccgcgagtacttccccaacttcgtgggcgagcccaagagcaaggacatcctgaagctgcgcctgtacgagcagcagcacggcaagtgcctgtacagcggcaaggagatcaacctgggccgcctgaacgagaagggctacgtggagatcgaccacgccctgcccttcagccgcacctgggacgacagcttcaacaacaaggtgctggtgctgggcagcgagaaccagaacaagggcaaccagaccccctacgagtacttcaacggcaaggacaacagccgcgagtggcaggagttcaaggcccgcgtggagaccagccgcttcccccgcagcaagaagcagcgcatcctgctgcagaagttcgacgaggacggcttcaaggagcgcaacctgaacgacacccgctacgtgaaccgcttcctgtgccagttcgtggccgaccgcatgcgcctgaccggcaagggcaagaagcgcgtgttcgccagcaacggccagatcaccaacctgctgcgcggcttctggggcctgcgcaaggtgcgcgccgagaacgaccgccaccacgccctggacgccgtggtggtggcctgcagcaccgtggccatgcagcagaagatcacccgcttcgtgcgctacaaggagatgaacgccttcgacggtaaaaccatcgacaaggagaccggcgaggtgctgcaccagaagacccacttcccccagccctgggagttcttcgcccaggaggtgatgatccgcgtgttcggcaagcccgacggcaagcccgagttcgaggaggccgacacccccgagaagctgcgcaccctgctggccgagaagctgagcagccgccctgaggccgtgcacgagtacgtgactcctctgttcgtgagccgcgcccccaaccgcaagatgagcggtcagggtcacatggagaccgtgaagagcgccaagcgcctggacgagggcgtgagcgtgctgcgcgtgcccctgacccagctgaagctgaaggacctggagaagatggtgaaccgcgagcgcgagcccaagctgtacgaggccctgaaggcccgcctggaggcccacaaggacgaccccgccaaggccttcgccgagcccttctacaagtacgacaaggccggcaaccgcacccagcaggtgaaggccgtgcgcgtggagcaggtgcagaagaccggcgtgtgggtgcgcaaccacaacggcatcgccgacaacgccaccatggtgcgcgtggacgtgttcgagaagggcgacaagtactacctggtgcccatctacagctggcaggtggccaagggcatcctgcccgaccgcgccgtggtgcagggcaaggacgaggaggactggcagctgatcgacgacagcttcaacttcaagttcagcctgcaccccaacgacctggtggaggtgatcaccaagaaggcccgcatgttcggctacttcgccagctgccaccgcggcaccggcaacatcaacatccgcatccacgacctggaccacaagatcggcaagaacggcatcctggagggcatcggcgtgaagaccgccctgagcttccagaagtaccagatcgacgagctgggcaaggagatccgcccctgccgcctgaagaagcgccctcctgtgcgctaa

SEQ ID NO: 14 - protein, 859 aa, Artificial Sequence
  Synthetic Cas9 consensus sequence derived from Sm, Sp, St, and Li Cas9 sequences
  misc_feature (4)..(4): Xaa can be any naturally occurring amino acid
  misc_feature (8)..(18): N-terminal RuvC-like domain
  misc_feature (21)..(21): Xaa can be any naturally occurring amino acid
  misc_feature (23)..(23): Xaa can be any naturally occurring amino acid
  misc_feature (24)..(24): Xaa can be any naturally occurring amino acid
  misc_feature (26)..(26): Xaa can be any naturally occurring amino acid
  misc_feature (29)..(31): Each Xaa can independently be any naturally occurring amino acid
  misc_feature (33)..(33): Xaa can be any naturally occurring amino acid
  misc_feature (36)..(36): Xaa can be any naturally occurring amino acid
  misc_feature (45)..(45): Xaa can be any naturally occurring amino acid
  misc_feature (54)..(54): Xaa can be any naturally occurring amino acid
  misc_feature (63)..(63): Xaa can be any naturally occurring amino acid
  misc_feature (71)..(71): Xaa can be any naturally occurring amino acid
  misc_feature (75)..(75): Xaa can be any naturally occurring amino acid
  misc_feature (76)..(76): Xaa can be any naturally occurring amino acid
  misc_feature (78)..(80): Each Xaa can independently be any naturally occurring amino acid
  misc_feature (82)..(82): Xaa can be any naturally occurring amino acid
  misc_feature (84)..(84): Xaa can be any naturally occurring amino acid
  misc_feature (85)..(85): Xaa can be any naturally occurring amino acid
  misc_feature (89)..(89): Xaa can be any naturally occurring amino acid
  misc_feature (90)..(90): Xaa can be any naturally occurring amino acid
  misc_feature (98)..(98): Xaa can be any naturally occurring amino acid
  misc_feature (100)..(100): Xaa can be any naturally occurring amino acid
  misc_feature (106)..(106): Xaa can be any naturally occurring amino acid
  misc_feature (113)..(113): Xaa can be any naturally occurring amino acid
  misc_feature (116)..(116): Xaa can be any naturally occurring amino acid
  misc_feature (125)..(125): Xaa can be any naturally occurring amino acid
  misc_feature (126)..(126): Xaa can be any naturally occurring amino acid
  misc_feature (128)..(133): Each Xaa can independently be any naturally occurring amino acid
  misc_feature (135)..(135): Xaa can be any naturally occurring amino acid
  misc_feature (137)..(137): Xaa can be any naturally occurring amino acid
  misc_feature (139)..(147): Each Xaa can independently be any naturally occurring amino acid
  misc_feature (153)..(155): Each Xaa can independently be any naturally occurring amino acid
  misc_feature (157)..(157): Xaa can be any naturally occurring amino acid
  misc_feature (159)..(159): Xaa can be any naturally occurring amino acid
  misc_feature (161)..(161): Xaa can be any naturally occurring amino acid
  misc_feature (163)..(163): Xaa can be any naturally occurring amino acid
  misc_feature (166)..(168): Each Xaa can independently be any naturally occurring amino acid
  misc_feature (170)..(170): Xaa can be any naturally occurring amino acid
  misc_feature (171)..(171): Xaa can be any naturally occurring amino acid
  misc_feature (173)..(175): Each Xaa can independently be any naturally occurring amino acid
  misc_feature (177)..(177): Xaa can be any naturally occurring amino acid
  misc_feature (183)..(183): Xaa can be any naturally occurring amino acid
  misc_feature (185)..(187): Each Xaa can independently be any naturally occurring amino acid
  misc_feature (189)..(189): Xaa can be any naturally occurring amino acid
  misc_feature (192)..(195): Each Xaa can independently be any naturally occurring amino acid
  misc_feature (198)..(198): Xaa can be any naturally occurring amino acid
  misc_feature (199)..(199): Xaa can be any naturally occurring amino acid
  misc_feature (202)..(202): Xaa can be any naturally occurring amino acid
  misc_feature (206)..(206): Xaa can be any naturally occurring amino acid
  misc_feature (207)..(207): Xaa can be any naturally occurring amino acid
  misc_feature (210)..(210): Xaa can be any naturally occurring amino acid
  misc_feature (212)..(212): Xaa can be any naturally occurring amino acid
  misc_feature (213)..(213): Xaa can be any naturally occurring amino acid
  misc_feature (219)..(219): Xaa can be any naturally occurring amino acid
  misc_feature (220)..(220): Xaa can be any naturally occurring amino acid
  misc_feature (222)..(222): Xaa can be any naturally occurring amino acid
  misc_feature (224)..(224): Xaa can be any naturally occurring amino acid
  misc_feature (226)..(226): Xaa can be any naturally occurring amino acid
  misc_feature (236)..(236): Xaa can be any naturally occurring amino acid
  misc_feature (240)..(240): Xaa can be any naturally occurring amino acid
  misc_feature (241)..(241): Xaa can be any naturally occurring amino acid
  misc_feature (244)..(246): Each Xaa can independently be any naturally occurring amino acid
  misc_feature (248)..(248): Xaa can be any naturally occurring amino acid
  misc_feature (249)..(249): Xaa can be any naturally occurring amino acid
  misc_feature (250)..(250): Xaa can be any naturally occurring amino acid
  misc_feature (252)..(254): Each Xaa can independently be any naturally occurring amino acid
  misc_feature (256)..(256): Xaa can be any naturally occurring amino acid
  misc_feature (257)..(257): Xaa can be any naturally occurring amino acid
  misc_feature (268)..(268): Xaa can be any naturally occurring amino acid
  misc_feature (271)..(271): Xaa can be any naturally occurring amino acid
  misc_feature (273)..(273): Xaa can be any naturally occurring amino acid
  misc_feature (277)..(277): Xaa can be any naturally occurring amino acid
  misc_feature (280)..(280): Xaa can be any naturally occurring amino acid
  misc_feature (281)..(281): Xaa can be any naturally occurring amino acid
  misc_feature (283)..(283): Xaa can be any naturally occurring amino acid
  misc_feature (289)..(289): Xaa can be any naturally occurring amino acid
  misc_feature (290)..(290): Xaa can be any naturally occurring amino acid
  misc_feature (292)..(294): Each Xaa can independently be any naturally occurring amino acid
  misc_feature (301)..(301): Xaa can be any naturally occurring amino acid
  misc_feature (308)..(308): Xaa can be any naturally occurring amino acid
  misc_feature (319)..(322): Each Xaa can independently be any naturally occurring amino acid
  misc_feature (328)..(328): Xaa can be any naturally occurring amino acid
  misc_feature (329)..(329): Xaa can be any naturally occurring amino acid
  misc_feature (335)..(337): Each Xaa can independently be any naturally occurring amino acid
  misc_feature (346)..(346): Xaa can be any naturally occurring amino acid
  misc_feature (347)..(347): Xaa can be any naturally occurring amino acid
  misc_feature (356)..(361): Each Xaa can independently be any naturally occurring amino acid
  misc_feature (363)..(363): Xaa can be any naturally occurring amino acid
  misc_feature (370)..(373): Each Xaa can independently be any naturally occurring amino acid
  misc_feature (375)..(375): Xaa can be any naturally occurring amino acid
  misc_feature (376)..(376): Xaa can be any naturally occurring amino acid
  misc_feature (379)..(379): Xaa can be any naturally occurring amino acid
  misc_feature (386)..(390): Each Xaa can independently be any naturally occurring amino acid
  misc_feature (393)..(393): Xaa can be any naturally occurring amino acid
  misc_feature (395)..(395): Xaa can be any naturally occurring amino acid
  misc_feature (396)..(396): Xaa can be any naturally occurring amino acid
  misc_feature (398)..(398): Xaa can be any naturally occurring amino acid
  misc_feature (400)..(400): Xaa can be any naturally occurring amino acid
  misc_feature (403)..(403): Xaa can be any naturally occurring amino acid
  misc_feature (407)..(407): Xaa can be any naturally occurring amino acid
  misc_feature (410)..(410): Xaa can be any naturally occurring amino acid
  misc_feature (411)..(411): Xaa can be any naturally occurring amino acid
  misc_feature (413)..(416): Each Xaa can independently be any naturally occurring amino acid
  misc_feature (418)..(418): Xaa can be any naturally occurring amino acid
  misc_feature (422)..(422): Xaa can be any naturally occurring amino acid
  misc_feature (428)..(428): Xaa can be any naturally occurring amino acid
  misc_feature (431)..(431): Xaa can be any naturally occurring amino acid
  misc_feature (433)..(433): Xaa can be any naturally occurring amino acid
  misc_feature (437)..(439): Each Xaa can independently be any naturally occurring amino acid
  misc_feature (445)..(445): Xaa can be any naturally occurring amino acid
  misc_feature (451)..(451): Xaa can be any naturally occurring amino acid
  misc_feature (456)..(456): Xaa can be any naturally occurring amino acid
  misc_feature (459)..(459): Xaa can be any naturally occurring amino acid
  misc_feature (465)..(469): Each Xaa can independently be any naturally occurring amino acid
  misc_feature (481)..(481): Xaa can be any naturally occurring amino acid
  misc_feature (482)..(482): Xaa can be any naturally occurring amino acid
  misc_feature (484)..(484): Xaa can be any naturally occurring amino acid
  misc_feature (490)..(490): Xaa can be any naturally occurring amino acid
  misc_feature (494)..(494): Xaa can be any naturally occurring amino acid
  misc_feature (495)..(502): RuvC-like domain
  misc_feature (497)..(497): Xaa can be any naturally occurring amino acid
  misc_feature (506)..(506): Xaa can be any naturally occurring amino acid
  misc_feature (510)..(510): Xaa can be any naturally occurring amino acid
  misc_feature (513)..(513): Xaa can be any naturally occurring amino acid
  misc_feature (514)..(514): Xaa can be any naturally occurring amino acid
  misc_feature (517)..(517): Xaa can be any naturally occurring amino acid
  misc_feature (520)..(520): Xaa can be any naturally occurring amino acid
  misc_feature (525)..(525): Xaa can be any naturally occurring amino acid
  misc_feature (526)..(526): Xaa can be any naturally occurring amino acid
  misc_feature (529)..(529): Xaa can be any naturally occurring amino acid
  misc_feature (531)..(531): Xaa can be any naturally occurring amino acid
  misc_feature (532)..(532): Xaa can be any naturally occurring amino acid
  misc_feature (534)..(534): Xaa can be any naturally occurring amino acid
  misc_feature (542)..(542): Xaa can be any naturally occurring amino acid
  misc_feature (546)..(546): Xaa can be any naturally occurring amino acid
  misc_feature (547)..(547): Xaa can be any naturally occurring amino acid
  misc_feature (553)..(553): Xaa can be any naturally occurring amino acid
  misc_feature (555)..(575): HNH-like domain
  misc_feature (556)..(556): Xaa can be any naturally occurring amino acid
  misc_feature (560)..(560): Xaa can be any naturally occurring amino acid
  misc_feature (563)..(563): Xaa can be any naturally occurring amino acid
  misc_feature (565)..(565): Xaa can be any naturally occurring amino acid
  misc_feature (567)..(567): Xaa can be any naturally occurring amino acid
  misc_feature (579)..(579): Xaa can be any naturally occurring amino acid
  misc_feature (582)..(582): Xaa can be any naturally occurring amino acid
  misc_feature (583)..(583): Xaa can be any naturally occurring amino acid
  misc_feature (585)..(585): Xaa can be any naturally occurring amino acid
  misc_feature (588)..(588): Xaa can be any naturally occurring amino acid
  misc_feature (590)..(590): Xaa can be any naturally occurring amino acid
  misc_feature (592)..(592): Xaa can be any naturally occurring amino acid
  misc_feature (594)..(596): Each Xaa can independently be any naturally occurring amino acid
  misc_feature (610)..(610): Xaa can be any naturally occurring amino acid
  misc_feature (616)..(616): Xaa can be any naturally occurring amino acid
  misc_feature (628)..(628): Xaa can be any naturally occurring amino acid
  misc_feature (631)..(631): Xaa can be any naturally occurring amino acid
  misc_feature (633)..(633): Xaa can be any naturally occurring amino acid
  misc_feature (634)..(634): Xaa can be any naturally occurring amino acid
  misc_feature (636)..(636): Xaa can be any naturally occurring amino acid
  misc_feature (638)..(641): Each Xaa can independently be any naturally occurring amino acid
  misc_feature (643)..(645): Each Xaa can independently be any naturally occurring amino acid
  misc_feature (653)..(653): Xaa can be any naturally occurring amino acid
  misc_feature (657)..(657): Xaa can be any naturally occurring amino acid
  misc_feature (659)..(659): Xaa can be any naturally occurring amino acid
  misc_feature (660)..(660): Xaa can be any naturally occurring amino acid
  misc_feature (665)..(665): Xaa can be any naturally occurring amino acid
  misc_feature (666)..(666): Xaa can be any naturally occurring amino acid
  misc_feature (668)..(668): Xaa can be any naturally occurring amino acid
  misc_feature (669)..(669): Xaa can be any naturally occurring amino acid
  misc_feature (670)..(677): RuvC-like domain
  misc_feature (680)..(680): Xaa can be any naturally occurring amino acid
  misc_feature (681)..(681): Xaa can be any naturally occurring amino acid
  misc_feature (683)..(683): Xaa can be any naturally occurring amino acid
  misc_feature (686)..(686): Xaa can be any naturally occurring amino acid
  misc_feature (696)..(696): Xaa can be any naturally occurring amino acid
  misc_feature (697)..(697): Xaa can be any naturally occurring amino acid
  misc_feature (704)..(704): Xaa can be any naturally occurring amino acid
  misc_feature (708)..(708): Xaa can be any naturally occurring amino acid
  misc_feature (710)..(710): Xaa can be any naturally occurring amino acid
  misc_feature (711)..(711): Xaa can be any naturally occurring amino acid
  misc_feature (714)..(714): Xaa can be any naturally occurring amino acid
  misc_feature (717)..(720): Each Xaa can independently be any naturally occurring amino acid
  misc_feature (722)..(722): Xaa can be any naturally occurring amino acid
  misc_feature (725)..(725): Xaa can be any naturally occurring amino acid
  misc_feature (727)..(727): Xaa can be any naturally occurring amino acid
  misc_feature (733)..(735): Each Xaa can independently be any naturally occurring amino acid
  misc_feature (740)..(740): Xaa can be any naturally occurring amino acid
  misc_feature (742)..(742): Xaa can be any naturally occurring amino acid
  misc_feature (749)..(754): Each Xaa can independently be any naturally occurring amino acid
  misc_feature (758)..(761): Each Xaa can independently be any naturally occurring amino acid
  misc_feature (763)..(768): Each Xaa can independently be any naturally occurring amino acid
  misc_feature (771)..(771): Xaa can be any naturally occurring amino acid
  misc_feature (774)..(777): Each Xaa can independently be any naturally occurring amino acid
  misc_feature (782)..(782): Xaa can be any naturally occurring amino acid
  misc_feature (784)..(786): Each Xaa can independently be any naturally occurring amino acid
  misc_feature (788)..(788): Xaa can be any naturally occurring amino acid
  misc_feature (790)..(790): Xaa can be any naturally occurring amino acid
  misc_feature (795)..(795): Xaa can be any naturally occurring amino acid
  misc_feature (799)..(799): Xaa can be any naturally occurring amino acid
  misc_feature (801)..(801): Xaa can be any naturally occurring amino acid
  misc_feature (802)..(802): Xaa can be any naturally occurring amino acid
  misc_feature (804)..(804): Xaa can be any naturally occurring amino acid
  misc_feature (806)..(813): Each Xaa can independently be any naturally occurring amino acid
  misc_feature (815)..(818): Each Xaa can independently be any naturally occurring amino acid
  misc_feature (820)..(820): Xaa can be any naturally occurring amino acid
  misc_feature (823)..(827): Each Xaa can independently be any naturally occurring amino acid
  misc_feature (829)..(829): Xaa can be any naturally occurring amino acid
  misc_feature (830)..(830): Xaa can be any naturally occurring amino acid
  misc_feature (832)..(832): Xaa can be any naturally occurring amino acid
  misc_feature (835)..(837): Each Xaa can independently be any naturally occurring amino acid
  misc_feature (842)..(844): Each Xaa can independently be any naturally occurring amino acid
  misc_feature (846)..(846): Xaa can be any naturally occurring amino acid
  misc_feature (848)..(848): Xaa can be any naturally occurring amino acid
  misc_feature (851)..(851): Xaa can be any naturally occurring amino acid
  misc_feature (857)..(857): Xaa can be any naturally occurring amino acid
  misc_feature (857)..(857): Xaa can be any naturally occurring amino acid
MKYXIGLDIGTNSVGWAVTDXYXXKXKGXXXIXKNXGLFDGTARXRTARRRRRXNRIYLQIFXEMDFFRLXSFVXXKXXXPXFXXEYHXXPTIYHLRXLXKDLRLXYLALAHXIKXRGNFLIEGXXNXXXXXXYXFXIXXXXXXXXXPEKGFXXXLXGXFXFXLEXXXKXXYXXXLXLLIGDXYXXXFXAKXXXXLSXXVTXALSXXMIXRXXHDLLKXXYXEXFXKGYAGYIDGXQFYXXKLXXXGXXXKXXXEXXLRKQRTFDNGXIPXQXHLEXAIXXQXYPFLNXXIXXXTFRIPYXVGPLAGXSFAWRKIPWNXXXXDSAFIXXMTDLPXXXVLPKHSLYXXVYNELTKVXXXXXXKXIFKRKVXXXXGXXFNXSTYHDLXXXXXLDXNXXEXIXLTXFEDXMIXXLXXXXKXLRRXYTGWGXLSXLXGIRXXXSTILDXLDNRNXMQLIXDLXFKIKQXXXXXGSPAIKKGILQXXKXVDELVXMGPXIVXEMARENQTXGNSXRKXXKEXGSXILKEXXNLXNXXLXLYYLQNGXDMYXXLDILSXYDXDHIXPQXFXDXSIDNVLSNRKDXVPXXVXKKXWXLXLXXXRKFDLTKAERGGLXDKAFIXRQLVETRQITKXVAXLXXNXDXXXXVXXXTLKSLVSXFRKXFXXLYKVXXNXXHHAHDAYLNVXXLXYPXLEEFVYGDYXXKATKFYXNIMXFXXGEXWKXXXXVXMQXNXVKKEQXXXPKNSXLXKDKYGGXXXXXXKGKXXXXIXXXXXXFLXGYXXXXLPKYXLXXXGXRXLASEXKGNXLXXLXAXXXXXXXXEXXXXFXANXXXXXLXXGXAFXXXIRRYXXXTXIXQSXTGLYEXRL

SEQ ID NO: 15 - protein, 8 aa, Artificial Sequence
  RuvC-like domain
  VARIANT (2)..(2): Xaa is Val or His
  VARIANT (3)..(3): Xaa is Ile, Leu, or Val
  VARIANT (5)..(5): Xaa is Met or Thr
IXXEXARE

SEQ ID NO: 16 - protein, 8 aa, Artificial Sequence
  RuvC-like domain
  VARIANT (3)..(3): Xaa is Ile, Leu, or Val
IVXEMARE

SEQ ID NO: 17 - protein, 8 aa, Artificial Sequence
  RuvC-like domain
  VARIANT (4)..(4): Xaa is His or Leu
  VARIANT (7)..(7): Xaa is Arg or Val
  VARIANT (8)..(8): Xaa is Glu or Val
HHAXDAXX

SEQ ID NO: 18 - protein, 8 aa, Artificial Sequence
  RuvC-like domain
HHAHDAYL

SEQ ID NO: 19 - protein, 30 aa, Artificial Sequence
  N-terminal RuvC-like domain
  VARIANT (2)..(2): Xaa is Lys or Pro
  VARIANT (4)..(4): Xaa is Val, Leu, Ile, or Phe
  VARIANT (5)..(5): Xaa is Gly, Ala, or Ser
  VARIANT (6)..(6): Xaa is Leu, Ile, Val, or Phe
  MOD_RES (7)..(26): N-terminal RuvC-like domain, each Xaa can be any amino acid or absent, region may encompass 5-20 residues
  VARIANT (29)..(29): Xaa is Asp, Glu, Asn, or Gln
KXYXXXXXXXXXXXXXXXXXXXXXXXTDXY

SEQ ID NO: 20 - protein, 12 aa, Artificial Sequence
  N-terminal RuvC-like domain
  VARIANT (2)..(2): Xaa is Ile, Val, Met, Leu, or Thr
  VARIANT (4)..(4): Xaa is Thr, Ile, Val, Ser, Asn, Tyr, Glu, or Leu
  VARIANT (5)..(5): Xaa is Asn, Ser, Gly, Ala, Asp, Thr, Arg, Met, or Phe
  VARIANT (6)..(6): Xaa is Ser, Tyr, Asn, or Phe
  VARIANT (7)..(7): Xaa is Val, Ile, Leu, Cys, Thr, or Phe
  VARIANT (9)..(9): Xaa is Trp, Phe, Val, Tyr, Ser, or Leu
  VARIANT (10)..(10): Xaa is Ala, Ser, Cys, Val, or Gly
  VARIANT (11)..(11): Xaa is Val, Ile, Leu, Ala, Met, or His
  VARIANT (12)..(12): Any amino acid or absent
DXGXXXXGXXXX

SEQ ID NO: 21 - protein, 12 aa, Artificial Sequence
  N-terminal RuvC-like domain
  VARIANT (2)..(2): Xaa is Ile, Val, Met, Leu, or Thr
  VARIANT (4)..(4): Xaa is Thr, Ile, Val, Ser, Asn, Tyr, Glu, or Leu
  VARIANT (5)..(5): Xaa is Asn, Ser, Gly, Ala, Asp, Thr, Arg, Met, or Phe
  VARIANT (7)..(7): Xaa is Val, Ile, Leu, Cys, Thr, or Phe
  VARIANT (9)..(9): Xaa is Trp, Phe, Val, Tyr, Ser, or Leu
  VARIANT (10)..(10): Xaa is Ala, Ser, Cys, Val, or Gly
  VARIANT (11)..(11): Xaa is Val, Ile, Leu, Ala, Met, or His
  VARIANT (12)..(12): Any amino acid or absent
DXGXXSXGXXXX

SEQ ID NO: 22 - protein, 12 aa, Artificial Sequence
  N-terminal RuvC-like domain
  VARIANT (4)..(4): Xaa is Thr, Ile, Val, Ser, Asn, Tyr, Glu, or Leu
  VARIANT (5)..(5): Xaa is Asn, Ser, Gly, Ala, Asp, Thr, Arg, Met, or Phe
  VARIANT (11)..(11): Xaa is Val, Ile, Leu, Ala, Met, or His
  VARIANT (12)..(12): Any amino acid or absent
DIGXXSVGWAXX

SEQ ID NO: 23 - protein, 12 aa, Artificial Sequence
  N-terminal RuvC-like domain
  MOD_RES (12)..(12): Any non-polar alkyl amino acid or a hydroxyl amino acid
DIGTNSVGWAVX

SEQ ID NO: 24 - protein, 73 aa, Artificial Sequence
  HNH-like domain
  VARIANT (8)..(8): Xaa is Lys or Arg
  VARIANT (12)..(12): Xaa is Val or Thr
  VARIANT (13)..(13): Xaa is Gly or Asp
  VARIANT (14)..(14): Xaa is Glu, Gln, or Asp
  VARIANT (15)..(15): Xaa is Glu or Asp
  VARIANT (19)..(19): Xaa is Asp, Asn, or His
  VARIANT (20)..(20): Xaa is Tyr, Arg, or Asn
  VARIANT (23)..(23): Xaa is Gln, Asp, or Asn
  MOD_RES (25)..(64): HNH-like domain, each Xaa can be any amino acid or absent, region may encompass 15-40 residues
  VARIANT (67)..(67): Xaa is Gly or Glu
  VARIANT (69)..(69): Xaa is Ser or Gly
  VARIANT (71)..(71): Xaa is Asp or Asn
LYYLQNGXDMYXXXXLDIXXLSXYXXXXXXXXXXXXXXXXXXXXXXXXXXXXXXXXXXXXXXXXNRXKXDXVP

SEQ ID NO: 25 - protein, 27 aa, Artificial Sequence
  HNH-like domain
  VARIANT (1)..(1): Xaa is Asp, Glu, Gln, or Asn
  VARIANT (2)..(2): Xaa is Leu, Ile, Arg, Gln, Val, Met, or Lys
  VARIANT (3)..(3): Xaa is Asp or Glu
  VARIANT (5)..(5): Xaa is Ile, Val, Thr, Ala, or Leu
  VARIANT (6)..(6): Xaa is Val, Tyr, Ile, Leu, Phe, or Trp
  VARIANT (8)..(8): Xaa is Gln, His, Arg, Lys, Tyr, Ile, Leu, Phe, or Trp
  VARIANT (9)..(9): Xaa is Ser, Ala, Asp, Thr, or Lys
  VARIANT (10)..(10): Xaa is Phe, Leu, Val, Lys, Tyr, Met, Ile, Arg, Ala, Glu, Asp, or Gln
  VARIANT (11)..(11): Xaa is Leu, Arg, Thr, Ile, Val, Ser, Cys, Tyr, Lys, Phe, or Gly
  VARIANT (12)..(12): Xaa is Lys, Gln, Tyr, Thr, Phe, Leu, Trp, Met, Ala, Glu, Gly, or Ser
  VARIANT (13)..(13): Xaa is Asp, Ser, Asn, Arg, Leu, or Thr
  VARIANT (14)..(14): Xaa is Asp, Asn, or Ser
  VARIANT (15)..(15): Xaa is Ser, Ala, Thr, Gly, or Arg
  VARIANT (16)..(16): Xaa is Ile, Leu, Phe, Ser, Arg, Tyr, Gln, Trp, Asp, Lys, or His
  VARIANT (17)..(17): Xaa is Asp, Ser, Ile, Asn, Glu, Ala, His, Phe, Leu, Gln, Met, Gly, Tyr, or Val
  VARIANT (19)..(19): Xaa is Lys, Leu, Arg, Met, Thr, or Phe
  VARIANT (20)..(20): Xaa is Val, Leu, Ile, Ala, or Thr
  VARIANT (21)..(21): Xaa is Leu, Ile, Val, or Ala
  VARIANT (22)..(22): Xaa is Thr, Val, Cys, Glu, Ser, or Ala
  VARIANT (23)..(23): Xaa is Arg, Phe, Thr, Trp, Glu, Leu, Asn, Cys, Lys, Val, Ser, Gln, Ile, Tyr, His, or Ala
  VARIANT (24)..(24): Xaa is Ser, Pro, Arg, Lys, Asn, Ala, His, Gln, Gly, or Leu
  VARIANT (25)..(25): Xaa is Asp, Gly, Thr, Asn, Ser, Lys, Ala, Ile, Glu, Leu, Gln, Arg, or Tyr
  VARIANT (26)..(26): Xaa is Lys, Val, Ala, Glu, Tyr, Ile, Cys, Leu, Ser, Thr, Gly, Lys, Met, Asp, or Phe
XXXHXXPXXXXXXXXXXNXXXXXXXXN

SEQ ID NO: 26 - protein, 27 aa, Artificial Sequence
  HNH-like domain
  VARIANT (1)..(1): Xaa is Asp or Glu
  VARIANT (2)..(2): Xaa is Leu, Ile, Arg, Gln, Val, Met, or Lys
  VARIANT (3)..(3): Xaa is Asp or Glu
  VARIANT (5)..(5): Xaa is Ile, Val, Thr, Ala, or Leu
  VARIANT (6)..(6): Xaa is Val, Tyr, Ile, Leu, Phe, or Trp
  VARIANT (8)..(8): Xaa is Gln, His, Arg, Lys, Tyr, Ile, Leu, Phe, or Trp
  VARIANT (10)..(10): Xaa is Phe, Leu, Val, Lys, Tyr, Met, Ile, Arg, Ala, Glu, Asp, or Gln
  VARIANT (11)..(11): Xaa is Leu, Arg, Thr, Ile, Val, Ser, Cys, Tyr, Lys, Phe, or Gly
  VARIANT (12)..(12): Xaa is Lys, Gln, Tyr, Thr, Phe, Leu, Trp, Met, Ala, Glu, Gly, or Ser
  VARIANT (16)..(16): Xaa is Ile, Leu, Phe, Ser, Arg, Tyr, Gln, Trp, Asp, Lys, or His
  VARIANT (17)..(17): Xaa is Asp, Ser, Ile, Asn, Glu, Ala, His, Phe, Leu, Gln, Met, Gly, Tyr, or Val
  VARIANT (22)..(22): Xaa is Thr, Val, Cys, Glu, Ser, or Ala
  VARIANT (23)..(23): Xaa is Arg, Phe, Thr, Trp, Glu, Leu, Asn, Cys, Lys, Val, Ser, Gln, Ile, Tyr, His, or Ala
  VARIANT (24)..(24): Xaa is Ser, Pro, Arg, Lys, Asn, Ala, His, Gln, Gly, or Leu
  VARIANT (25)..(25): Xaa is Asp, Gly, Thr, Asn, Ser, Lys, Ala, Ile, Glu, Leu, Gln, Arg, or Tyr
  VARIANT (26)..(26): Xaa is Lys, Val, Ala, Glu, Tyr, Ile, Cys, Leu, Ser, Thr, Gly, Lys, Met, Asp, or Phe
XXXHXXPXSXXXDDSXXNKVLXXXXXN

SEQ ID NO: 27 - protein, 27 aa, Artificial Sequence
  HNH-like domain
  VARIANT (1)..(1): Xaa is Asp or Glu
  VARIANT (3)..(3): Xaa is Asp or Glu
  VARIANT (8)..(8): Xaa is Gln, His, Arg, Lys, Tyr, Ile, Leu, or Trp
  VARIANT (10)..(10): Xaa is Phe, Leu, Val, Lys, Tyr, Met, Ile, Arg, Ala, Glu, Asp, or Gln
  VARIANT (11)..(11): Xaa is Leu, Arg, Thr, Ile, Val, Ser, Cys, Tyr, Lys, Phe, or Gly
  VARIANT (12)..(12): Xaa is Lys, Gln, Tyr, Thr, Phe, Leu, Trp, Met, Ala, Glu, Gly, or Ser
  VARIANT (16)..(16): Xaa is Ile, Leu, Phe, Ser, Arg, Tyr, Gln, Trp, Asp, Lys, or His
  VARIANT (17)..(17): Xaa is Asp, Ser, Ile, Asn, Glu, Ala, His, Phe, Leu, Gln, Met, Gly, Tyr, or Val
  VARIANT (23)..(23): Xaa is Arg, Phe, Thr, Trp, Glu, Leu, Asn, Cys, Lys, Val, Ser, Gln, Ile, Tyr, His, or Ala
  VARIANT (24)..(24): Xaa is Ser, Pro, Arg, Lys, Asn, Ala, His, Gln, Gly, or Leu
  VARIANT (25)..(25): Xaa is Asp, Gly, Thr, Asn, Ser, Lys, Ala, Ile, Glu, Leu, Gln, Arg, or Tyr
  VARIANT (26)..(26): Xaa is Lys, Val, Ala, Glu, Tyr, Ile, Cys, Leu, Ser, Thr, Gly, Lys, Met, Asp, or Phe
XVXHIVPXSXXXDDSXXNKVLTXXXXN

SEQ ID NO: 28 - protein, 27 aa, Artificial Sequence
  HNH-like domain
  VARIANT (2)..(2): Xaa is Ile or Val
  VARIANT (6)..(6): Xaa is Ile or Val
  VARIANT (9)..(9): Xaa is Ala or Ser
  VARIANT (11)..(11): Xaa is Ile or Leu
  VARIANT (12)..(12): Xaa is Lys or Thr
  VARIANT (14)..(14): Xaa is Asp or Asn
  VARIANT (19)..(19): Xaa is Arg, Lys, or Leu
  VARIANT (22)..(22): Xaa is Thr or Val
  VARIANT (23)..(23): Xaa is Ser or Arg
  VARIANT (25)..(25): Xaa is Lys, Asp, or Ala
  VARIANT (26)..(26): Xaa is Glu, Lys, Gly, or Asn
DXDHIXPQXFXXDXSIDNXVLXXSXXN

SEQ ID NO: 29 - RNA, 116 nt, Artificial Sequence
  gRNA
  misc_feature (1)..(20): a, c, u, g, unknown or other
  misc_feature (1)..(20): targeting region
  misc_feature (21)..(42): first complementarity domain
  misc_feature (43)..(46): linking domain
  misc_feature (47)..(70): second complementarity domain
nnnnnnnnnnnnnnnnnnnnguuuuagagcuaugcuguuuuggaaacaaaacagcauagcaaguuaaaauaaggcuaguccguuaucaacuugaaaaaguggcaccgagucggugc

SEQ ID NO: 30 - RNA, 116 nt, Artificial Sequence
  gRNA
  misc_feature (1)..(20): a, c, u, g, unknown or other
  misc_feature (1)..(20): targeting region
  misc_feature (21)..(42): first complementarity domain
  misc_feature (43)..(46): linking domain
  misc_feature (47)..(70): second complementarity domain
nnnnnnnnnnnnnnnnnnnnguauuagagcuaugcuguauuggaaacaauacagcauagcaaguuaauauaaggcuaguccguuaucaacuugaaaaaguggcaccgagucggugc

SEQ ID NO: 31 - RNA, 96 nt, Artificial Sequence
  gRNA
  misc_feature (1)..(20): a, c, u, g, unknown or other
  misc_feature (1)..(20): targeting domain
  misc_feature (21)..(32): first complementarity domain
  misc_feature (33)..(36): linking domain
  misc_feature (37)..(50): second complementarity domain
  misc_feature (51)..(62): proximal domain
nnnnnnnnnnnnnnnnnnnnguuuaagagcuagaaauagcaaguuuaaauaaggcuaguccguuaucaacuugaaaaaguggcaccgagucggugc

SEQ ID NO: 32 - RNA, 47 nt, Artificial Sequence
  gRNA proximal and tail domains derived from S. pyogenes
aaggcuaguccguuaucaacuugaaaaaguggcaccgagucggugcu

SEQ ID NO: 33 - RNA, 49 nt, Artificial Sequence
  gRNA proximal and tail domains
aaggcuaguccguuaucaacuugaaaaaguggcaccgagucgguggugc

SEQ ID NO: 34 - RNA, 51 nt, Artificial Sequence
  gRNA proximal and tail domains
aaggcuaguccguuaucaacuugaaaaaguggcaccgagucggugcggauc

SEQ ID NO: 35 - RNA, 31 nt, Artificial Sequence
  gRNA proximal and tail domains
aaggcuaguccguuaucaacuugaaaaagug

SEQ ID NO: 36 - RNA, 18 nt, Artificial Sequence
  gRNA proximal and tail domains
aaggcuaguccguuauca

SEQ ID NO: 37 - RNA, 12 nt, Artificial Sequence
  gRNA proximal and tail domains
aaggcuaguccg

SEQ ID NO: 38 - RNA, 102 nt, Artificial Sequence
  Unimolecular gRNA derived from S. aureus
  misc_feature (1)..(20): n is a, c, g, or u
  misc_feature (1)..(20): Targeting domain
nnnnnnnnnnnnnnnnnnnnguuuuaguacucuggaaacagaaucuacuaaaacaaggcaaaaugccguguuuaucucgucaacuuguuggcgagauuuuuu

SEQ ID NO: 39 - RNA, 42 nt, Artificial
  Modular gRNA derived from S. pyogenes
  misc_feature (1)..(20): a, c, u, g, unknown or other
  misc_feature (1)..(20): Targeting domain
  misc_feature (21)..(42): First complementarity domain
nnnnnnnnnnnnnnnnnnnnguuuuagagcuaugcuguuuug

SEQ ID NO: 40 - RNA, 85 nt, Artificial Sequence
  Modular gRNA derived from S. pyogenes
  misc_feature (1)..(9): 5' extension domain
  misc_feature (10)..(33): Second complementarity domain
  misc_feature (34)..(45): Proximal domain
  misc_feature (46)..(85): Tail domain
ggaaccauucaaaacagcauagcaaguuaaaauaaggcuaguccguuaucaacuugaaaaaguggcaccgagucggugcuuuuuu

SEQ ID NO: 41 - RNA, 62 nt, Artificial Sequence
  Unimolecular gRNA derived from S. pyogenes
  misc_feature (1)..(20): a, c, u, g, unknown or other
  misc_feature (1)..(20): Targeting domain
  misc_feature (21)..(32): First complementarity domain
  misc_feature (33)..(36): Linking domain
  misc_feature (37)..(50): Second complementarity domain
  misc_feature (51)..(62): Proximal domain
nnnnnnnnnnnnnnnnnnnnguuuuagagcuagaaauagcaaguuaaaauaaggcuaguccg

SEQ ID NO: 42 - RNA, 102 nt, Artificial Sequence
  Unimolecular gRNA derived from S. pyogenes
  misc_feature (1)..(20): a, c, u, g, unknown or other
  misc_feature (1)..(20): Targeting domain
  misc_feature (21)..(32): First complementarity domain
  misc_feature (33)..(36): Linking domain
  misc_feature (37)..(50): Second complementarity domain
  misc_feature (51)..(62): Proximal domain
  misc_feature (63)..(102): Tail domain
nnnnnnnnnnnnnnnnnnnnguuuuagagcuagaaauagcaaguuaaaauaaggcuaguccguuaucaacuugaaaaaguggcaccgagucggugcuuuuuu

SEQ ID NO: 43 - RNA, 75 nt, Artificial Sequence
  Unimolecular gRNA derived from S. pyogenes
  misc_feature (1)..(20): Targeting domain
  misc_feature (1)..(20): a, c, u, g, unknown or other
  misc_feature (21)..(36): First complementarity domain
  misc_feature (37)..(40): Linking domain
  misc_feature (41)..(58): Second complementarity domain
  misc_feature (59)..(70): Proximal domain
  misc_feature (71)..(75): Tail domain
nnnnnnnnnnnnnnnnnnnnguuuuagagcuaugcugaaaagcauagcaaguuaaaauaaggcuaguccguuauc

SEQ ID NO: 44 - RNA, 87 nt, Artificial Sequence
  Unimolecular gRNA derived from S. pyogenes
  misc_feature (1)..(20): a, c, u, g, unknown or other
  misc_feature (1)..(20): Targeting domain
  misc_feature (21)..(32): First complementarity domain
  misc_feature (43)..(46): Linking domain
  misc_feature (57)..(70): Second complementarity domain
  misc_feature (71)..(82): Proximal domain
  misc_feature (83)..(87): Tail domain
nnnnnnnnnnnnnnnnnnnnguuuuagagcuaugcuguuuuggaaacaaaacagcauagcaaguuaaaauaaggcuaguccguuauc

SEQ ID NO: 45 - RNA, 42 nt, Artificial Sequence
  Modular gRNA derived from S. thermophilus
  misc_feature (1)..(20): a, c, u, g, unknown or other
  misc_feature (1)..(20): Targeting domain
  misc_feature (21)..(42): First complementarity domain
nnnnnnnnnnnnnnnnnnnnguuuuagagcuguguuguuucg

SEQ ID NO: 46 - RNA, 78 nt, Artificial Sequence
  Modular gRNA derived from S. thermophilus
  misc_feature (1)..(3): 5' extension domain
  misc_feature (4)..(27): Second complementarity domain
  misc_feature (28)..(40): Proximal domain
  misc_feature (41)..(78): Tail domain
gggcgaaacaacacagcgaguuaaaauaaggcuuaguccguacucaacuugaaaagguggcaccgauucgguguuuuu

SEQ ID NO: 47 - RNA, 85 nt, Artificial Sequence
  Modular gRNA derived from S. pyogenes
gaaccauucaaaacagcauagcaaguuaaaauaaggcuaguccguuaucaacuugaaaaaguggcaccgagucggugcuuuuuuu

SEQ ID NO: 48 - RNA, 96 nt, Artificial Sequence
  gRNA from S. pyogenes
  misc_feature (1)..(20): n is a, c, g, or u
  misc_feature (1)..(20): Targeting domain
nnnnnnnnnnnnnnnnnnnnguuuuagagcuagaaauagcaaguuaaaauaaggcuaguccguuaucaacuugaaaaaguggcaccgagucggugc

SEQ ID NO: 49 - RNA, 96 nt, Artificial Sequence
  gRNA
  misc_feature (1)..(20): n is a, c, g, or u
  misc_feature (1)..(20): Targeting domain
  misc_feature (21)..(32): First complementarity domain
  misc_feature (33)..(36): Linking domain
  misc_feature (37)..(50): Second complementarity domain
  misc_feature (51)..(62): Proximal domain
nnnnnnnnnnnnnnnnnnnnguauuagagcuagaaauagcaaguuaauauaaggcuaguccguuaucaacuugaaaaaguggcaccgagucggugc

SEQ ID NO: 50 - RNA, 104 nt, Artificial Sequence
  gRNA
  misc_feature (1)..(20): n is a, c, g, or u
  misc_feature (1)..(20): Targeting domain
  misc_feature (21)..(36): First complementarity domain
  misc_feature (37)..(40): Linking domain
  misc_feature (41)..(58): Second complementarity domain
nnnnnnnnnnnnnnnnnnnnguuuuagagcuaugcugaaaagcauagcaaguuaaaauaaggcuaguccguuaucaacuugaaaaaguggcaccgagucggugc

SEQ ID NO: 51 - RNA, 106 nt, Artificial Sequence
  gRNA
  misc_feature (1)..(20): n is a, c, g, or u
  misc_feature (1)..(20): Targeting domain
  misc_feature (21)..(37): First complementarity domain
  misc_feature (38)..(41): Linking domain
  misc_feature (42)..(60): Second complementarity domain
nnnnnnnnnnnnnnnnnnnnguuuuagagcuaugcuggaaacagcauagcaaguuaaaauaaggcuaguccguuaucaacuugaaaaaguggcaccgagucggugc

SEQ ID NO: 52 - protein, 12 aa, Peptoniphilus duerdenii
DIGTASVGWAVT

SEQ ID NO: 53 - protein, 12 aa, Treponema denticola
DVGTGSVGWAVT

SEQ ID NO: 54 - protein, 12 aa, S. mutans
DIGTNSVGWAVV

SEQ ID NO: 55 - protein, 12 aa, S. pyogenes
DIGTNSVGWAVI

SEQ ID NO: 56 - protein, 12 aa, L. innocua
DIGTNSVGWAVL

SEQ ID NO: 57 - protein, 12 aa, Flavobacterium branchiophilum FL-15
DLGTNSIGWAVV

SEQ ID NO: 58 - protein, 11 aa, Artificial Sequence
  N-terminal RuvC-like domain
DLGTNSIGWAI

SEQ ID NO: 59 - protein, 12 aa, Bacteroides fragilis, NCTC 9343
DLGTNSIGWALV

SEQ ID NO: 60 - protein, 12 aa, Fusobacterium nucleatum
DIGTNSVGWCVT

SEQ ID NO: 61 - protein, 12 aa, Acidaminococcus sp. D21
DIGTNSVGYAVT

SEQ ID NO: 62 - protein, 12 aa, Coprococcus catus GD-7
DMGTGSLGWAVT

SEQ ID NO: 63 - protein, 12 aa, Oenococcus kitaharae DSM 17330
DIGTSSVGWAAI

SEQ ID NO: 64 - protein, 12 aa, Catenibacterium mitsuokai DSM 15897
DLGTGSVGWAVV

SEQ ID NO: 65 - protein, 12 aa, Mycoplasma gallisepticum str. F
DLGVGSVGWAIV

SEQ ID NO: 66 - protein, 12 aa, Mycoplasma ovipneumoniae SC01
DLGIASIGWAII

SEQ ID NO: 67 - protein, 12 aa, Mycoplasma canis PG 14
DLGIASVGWAIV

SEQ ID NO: 68 - protein, 12 aa, Mycoplasma synoviae 53
DLGVASVGWSIV

SEQ ID NO: 69 - protein, 12 aa, Eubacterium rectale
DIGIASVGWAIL

SEQ ID NO: 70 - protein, 12 aa, Enterococcus faecalis TX0012
DLGISSVGWSVI

SEQ ID NO: 71 - protein, 12 aa, Ilyobacter polytropus DSM 2926
DIGIASVGWSVI

SEQ ID NO: 72 - protein, 12 aa, Ruminococcus albus 8
DVGIGSIGWAVI

SEQ ID NO: 73 - protein, 12 aa, Elusimicrobium minutum Pei191
DLGVGSIGFAIV

SEQ ID NO: 74 - protein, 12 aa, Akkermansia muciniphila
DIGYASIGWAVI

SEQ ID NO: 75 - protein, 12 aa, Artificial Sequence
  N-terminal RuvC-like domain
DTGTNSLGWAIV

SEQ ID NO: 76 - protein, 12 aa, Cand. Puniceispirillum marinum
DLGTNSIGWCLL

SEQ ID NO: 77 - protein, 12 aa, Rhodospirillum rubrum
DIGTDSLGWAVF

SEQ ID NO: 78 - protein, 12 aa, Lactobacillus rhamnosus GG
DIGSNSIGFAVV

SEQ ID NO: 79 - protein, 12 aa, Sphaerochaeta globus str. Buddy
DLGVGSIGVAVA

SEQ ID NO: 80 - protein, 12 aa, Artificial Sequence
  N-terminal RuvC-like domain
DLGIASCGWGVV

SEQ ID NO: 81 - protein, 12 aa, Mycoplasma mobile 163K
DLGIASVGWCLT

SEQ ID NO: 82 - protein, 12 aa, Streptococcus thermophilus LMD-9
DIGIGSVGVGIL

SEQ ID NO: 83 - protein, 12 aa, Staphylococcus lugdunensis M23590
DIGITSVGYGLI

SEQ ID NO: 84 - protein, 12 aa, Eubacterium dolichum DSM 3991
DIGITSVGFGII

SEQ ID NO: 85 - protein, 12 aa, Lactobacillus coryniformis KCTC 3535
DVGITSTGYAVL

SEQ ID NO: 86 - protein, 12 aa, Nitratifractor salsuginis DSM 16511
DLGITSFGYAIL

SEQ ID NO: 87 - protein, 12 aa, Bifidobacterium bifidum S17
DIGNASVGWSAF

SEQ ID NO: 88 - protein, 12 aa, Artificial Sequence
  N-terminal RuvC-like domain
DVGTNSCGWVAM

SEQ ID NO: 89 - protein, 12 aa, Acidothermus cellulolyticus 11B
DVGERSIGLAAV

SEQ ID NO: 90 - protein, 12 aa, Bifidobacterium longum DJO10A
DVGLNSVGLAAV

SEQ ID NO: 91 - protein, 12 aa, Artificial Sequence
  N-terminal RuvC-like domain
DVGLMSVGLAAI

SEQ ID NO: 92 - protein, 12 aa, Artificial Sequence
  N-terminal RuvC-like domain
DVGTFSVGLAAI

SEQ ID NO: 93 - protein, 12 aa, Staphylococcus pseudintermedius ED99
DIGTGSVGYACM

SEQ ID NO: 94 - protein, 12 aa, Artificial Sequence
  N-terminal RuvC-like domain
DLGTTSIGFAHI

SEQ ID NO: 95 - protein, 12 aa, Artificial Sequence
  N-terminal RuvC-like domain
DLGTNSIGSSVR

SEQ ID NO: 96 - protein, 12 aa, Artificial Sequence
  N-terminal RuvC-like domain
DIGTNSIGWAVI

SEQ ID NO: 97 - protein, 12 aa, Pasteurella multocida str. Pm70
DLGIASVGWAVV

SEQ ID NO: 98 - protein, 12 aa, Artificial Sequence
  N-terminal RuvC-like domain
DIGIASVGWAVL

SEQ ID NO: 99 - protein, 12 aa, Helicobacter mustelae 12198
DIGIASIGWAVI

SEQ ID NO: 100 - protein, 12 aa, Artificial Sequence
  N-terminal RuvC-like domain
DIGIASVGWAII

SEQ ID NO: 101 - protein, 12 aa, Clostridium cellulolyticum H10
DVGIASVGWAVI

SEQ ID NO: 102 - protein, 11 aa, Artificial Sequence
  N-terminal RuvC-like domain
DIGIASVGWAL

SEQ ID NO: 103 - protein, 12 aa, Neisseria meningitidis
DIGIASVGWAMV

SEQ ID NO: 104 - protein, 12 aa, Artificial Sequence
  N-terminal RuvC-like domain
DIGITSVGWAVI

SEQ ID NO: 105 - protein, 12 aa, Wolinella succinogenes DSM 1740
DLGISSLGWAIV

SEQ ID NO: 106 - protein, 12 aa, Azospirillum sp. B510
DLGTNSIGWGLL

SEQ ID NO: 107 - protein, 12 aa, Artificial Sequence
  N-terminal RuvC-like domain
DLGSTSLGWAIF

SEQ ID NO: 108 - protein, 12 aa, Campylobacter jejuni, NCTC 11168
DIGISSIGWAFS

SEQ ID NO: 109 - protein, 12 aa, Parvibaculum lavamentivorans DS-1
DIGTTSIGFSVI

SEQ ID NO: 110 - protein, 12 aa, Dinoroseobacter shibae DFL 12
DIGTSSIGWWLY

SEQ ID NO: 111 - protein, 12 aa, Nitrobacter hamburgensis X14
DLGSNSLGWFVT

SEQ ID NO: 112 - protein, 12 aa, Bradyrhizobium sp. BTAi1
DLGANSLGWFVV

SEQ ID NO: 113 - protein, 15 aa, Artificial Sequence
  N-terminal RuvC-like domain
DIGLRIGITSCGWSI

SEQ ID NO: 114 - protein, 12 aa, Artificial Sequence
  N-terminal RuvC-like domain
DMGAKYTGVFYA

SEQ ID NO: 115 - protein, 12 aa, Wolinella succinogenes DSM 1740
DLGGKNTGFFSF

SEQ ID NO: 116 - protein, 12 aa, Artificial Sequence
  N-terminal RuvC-like domain
DLGVKNTGVFSA

SEQ ID NO: 117 - protein, 12 aa, Artificial Sequence
  N-terminal RuvC-like domain
DLGAKFTGVALY

SEQ ID NO: 118 - protein, 12 aa, Legionella pneumophila str. Paris
DLGGKFTGVCLS

SEQ ID NO: 119 - protein, 12 aa, Artificial Sequence
  N-terminal RuvC-like domain
DLGGTYTGTFIT

SEQ ID NO: 120 - protein, 12 aa, S. thermophilus
DIGTNSVGWAVT

SEQ ID NO: 121 - protein, 12 aa, Eubacterium yurii
DVGTNSVGWAVT

SEQ ID NO: 122 - protein, 12 aa, Artificial Sequence
  N-terminal RuvC-like domain
DMGTNSVGWAVT

SEQ ID NO: 123 - protein, 12 aa, Solobacterium moorei F0204
DVGTSSVGWAVT

SEQ ID NO: 124 - protein, 27 aa, Treponema denticola
DIDHIYPQSKIKDDSISNRVLVCSSCN

SEQ ID NO: 125 - protein, 27 aa, Coprococcus catus GD-7
DIDHIYPQSKTMDDSLNNRVLVKKNYN

SEQ ID NO: 126 - protein, 27 aa, Peptoniphilus duerdenii
DQDHIYPKSKIYDDSLENRVLVKKNLN

SEQ ID NO: 127 - protein, 27 aa, Catenibacterium mitsuokai DSM 15897
QIDHIVPQSLVKDDSFDNRVLVVPSEN

SEQ ID NO: 128 - protein, 27 aa, S. mutans
DIDHIIPQAFIKDNSIDNRVLTSSKEN

SEQ ID NO: 129 - protein, 27 aa, S. thermophilus
DIDHIIPQAFLKDNSIDNKVLVSSASN

SEQ ID NO: 130 - protein, 27 aa, Oenococcus kitaharae DSM 17330
DIDHIIPQAYTKDNSLDNRVLVSNITN

SEQ ID NO: 131 - protein, 27 aa, L. inocua
DIDHIVPQSFITDNSIDNLVLTSSAGN

SEQ ID NO: 132 - protein, 27 aa, S. pyogenes
DVDHIVPQSFLKDDSIDNKVLTRSDKN

SEQ ID NO: 133 - protein, 27 aa, Acidaminococcus sp. D21
NIDHIYPQSMVKDDSLDNKVLVQSEIN

SEQ ID NO: 134 - protein, 27 aa, Lactobacillus rhamnosus GG
DIDHILPQSLIKDDSLDNRVLVNATIN

SEQ ID NO: 135 - protein, 27 aa, Artificial Sequence
  HNH-LIKE domain
DIDHILPQSFIKDDSLENRVLVKKAVN

SEQ ID NO: 136 - protein, 27 aa, Staphylococcus pseudintermedius ED99
EVDHIFPRSFIKDDSIDNKVLVIKKMN

SEQ ID NO: 137 - protein, 27 aa, Artificial Sequence
  HNH-LIKE domain
EVDHIIPRSYIKDDSFENKVLVYREEN

SEQ ID NO: 138 - protein, 27 aa, Bifidobacterium bifidum S17
DIDHIIPQAVTQNDSIDNRVLVARAEN

SEQ ID NO: 139 - protein, 27 aa, Mycoplasma gallisepticum str. F
EIDHIIPYSISFDDSSSNKLLVLAESN

SEQ ID NO: 140 - protein, 27 aa, Mycoplasma canis PG 14
EIDHIIPYSLCFDDSSANKVLVHKQSN

SEQ ID NO: 141 - protein, 27 aa, Ilyobacter polytropus DSM 2926
DIDHIIPYSRSMDDSYSNKVLVLSGEN

SEQ ID NO: 142 - protein, 27 aa, Artificial Sequence
  HNH-LIKE domain
DIDHIIPYSKSMDDSFNNKVLCLAEEN

SEQ ID NO: 143 - protein, 27 aa, Campylobacter jejuni
EIDHIYPYSRSFDDSYMNKVLVFTKQN

SEQ ID NO: 144 - protein, 27 aa, Clostridium cellulolyticum H10
QIDHIYPYSRSMDDSYMNKVLVLTDEN

SEQ ID NO: 145 - protein, 27 aa, Artificial Sequence
  HNH-LIKE domain
EIDHIIPFSRSFDDSLSNKILVLGSEN

SEQ ID NO: 146 - protein, 27 aa, N. meningitides
EIDHALPFSRTWDDSFNNKVLVLGSEN

SEQ ID NO: 147 - protein, 27 aa, Pasteurella multocida str. Pm70
EIDHALPFSRTWDDSFNNKVLVLASEN

SEQ ID NO: 148 - protein, 27 aa, Enterococcus faecalis TX0012
EIDHIIPISISLDDSINNKVLVLSKAN

SEQ ID NO: 149 - protein, 27 aa, Eubacterium dolichum DSM 3991
EVDHIIPISISLDDSITNKVLVTHREN

SEQ ID NO: 150 - protein, 27 aa, Artificial Sequence
  HNH-LIKE domain
QVDHALPYSRSYDDSKNNKVLVLTHEN

SEQ ID NO: 151 - protein, 27 aa, Streptococcus thermophilus LMD-9
EVDHILPLSITFDDSLANKVLVYATAN

SEQ ID NO: 152 - protein, 27 aa, Eubacterium rectale
EIDHIIPRSISFDDARSNKVLVYRSEN

SEQ ID NO: 153 - protein, 27 aa, Staphylococcus lugdunensis M23590
EVDHIIPRSVSFDNSYHNKVLVKQSEN

SEQ ID NO: 154 - protein, 27 aa, Artificial Sequence
  HNH-LIKE domain
DIDHILPYSITFDDSFRNKVLVTSQEN

SEQ ID NO: 155 - protein, 27 aa, Wolinella succinogenes DSM 1740
EIDHILPRSRSADDSFANKVLCLARAN

SEQ ID NO: 156 - protein, 27 aa, Cand. Puniceispirillum marinum
EIEHLLPFSLTLDDSMANKTVCFRQAN

SEQ ID NO: 157 - protein, 27 aa, Azospirillum sp. B510
DIDHILPFSVSLDDSAANKVVCLREAN

SEQ ID NO: 158 - protein, 27 aa, Bradyrhizobium sp. BTAi1
DIDHLIPFSISWDDSAANKVVCMRYAN

SEQ ID NO: 159 - protein, 27 aa, Nitrobacter hamburgensis X14
DIDHILPVAMTLDDSPANKIICMRYAN

SEQ ID NO: 160 - protein, 27 aa, Artificial Sequence
  HNH-LIKE domain
DVDHILPYSRTLDDSFPNRTLCLREAN

SEQ ID NO: 161 - protein, 27 aa, Artificial Sequence
  HNH-LIKE domain
EIEHILPFSRTLDDSLNNRTVAMRRAN

SEQ ID NO: 162 - protein, 27 aa, Lactobacillus coryniformis KCTC 3535
EVDHIIPYSISWDDSYTNKVLTSAKCN

SEQ ID NO: 163 - protein, 27 aa, Artificial Sequence
  HNH-LIKE domain
QVDHILPWSRFGDDSYLNKTLCTARSN

SEQ ID NO: 164 - protein, 27 aa, Ralstonia syzygii R24
QVDHILPFSKTLDDSFANKVLAQHDAN

SEQ ID NO: 165 - protein, 27 aa, Helicobacter mustelae 12198
QIDHAFPLSRSLDDSQSNKVLCLTSSN

SEQ ID NO: 166 - protein, 27 aa, Mycoplasma mobile 163K
DIDHIVPRSISFDDSFSNLVIVNKLDN

SEQ ID NO: 167 - protein, 27 aa, Mycoplasma ovipneumoniae SC01
EIEHIIPYSMSYDNSQANKILTEKAEN

SEQ ID NO: 168 - protein, 27 aa, Mycoplasma synoviae 53
EIDHVIPYSKSADDSWFNKLLVKKSTN

SEQ ID NO: 169 - protein, 27 aa, Aminomonas paucivorans DSM 12260
EMDHILPYSRSLDNGWHNRVLVHGKDN

SEQ ID NO: 170 - protein, 27 aa, Ruminococcus albus 8
EVDHIVPYSLILDNTINNKALVYAEEN

SEQ ID NO: 171 - protein, 27 aa, Artificial Sequence
  HNH-LIKE domain
EIEHVIPQSLYFDDSFSNKVICEAEVN

SEQ ID NO: 172 - protein, 27 aa, Bacteroides fragilis, NCTC 9343
DIEHIIPQARLFDDSFSNKTLEARSVN

SEQ ID NO: 173 - protein, 27 aa, Artificial Sequence
  HNH-LIKE domain
EIEHIVPKARVFDDSFSNKTLTFHRIN

SEQ ID NO: 174 - protein, 28 aa, Finegoldia magna
DKDHIIPQSMKKDDSIINNLVLVNKNAN

SEQ ID NO: 175 - protein, 27 aa, Parvibaculum lavamentivorans DS-1
EVEHIWPRSRSFDNSPRNKTLCRKDVN

SEQ ID NO: 176 - protein, 27 aa, Artificial Sequence
  HNH-LIKE domain
IVNHIIPYNRSFDDTYHNRVLTLTETK

SEQ ID NO: 177 - protein, 27 aa, Artificial Sequence
  HNH-LIKE domain
DMEHTIPKSISFDNSDQNLTLCESYYN

SEQ ID NO: 178 - protein, 27 aa, Artificial Sequence
  HNH-LIKE domain
DIEHTIPRSAGGDSTKMNLTLCSSRFN

SEQ ID NO: 179 - protein, 27 aa, Artificial Sequence
  HNH-LIKE domain
DIEHTIPRSISQDNSQMNKTLCSLKFN

SEQ ID NO: 180 - protein, 27 aa, Rhodospirillum rubrum
DIDHVIPLARGGRDSLDNMVLCQSDAN

SEQ ID NO: 181 - protein, 27 aa, Elusimicrobium minutum Pei191
DIEHLFPIAESEDNGRNNLVISHSACN

SEQ ID NO: 182 - protein, 27 aa, Sphaerochaeta globus str. Buddy
DVDHIFPRDDTADNSYGNKVVAHRQCN

SEQ ID NO: 183 - protein, 27 aa, Nitratifractor salsuginis DSM 16511
DIEHIVPQSLGGLSTDYNTIVTLKSVN

SEQ ID NO: 184 - protein, 27 aa, Acidothermus cellulolyticus 11B
ELDHIVPRTDGGSNRHENLAITCGACN

SEQ ID NO: 185 - protein, 28 aa, Bifidobacterium longum DJO10A
EMDHIVPRKGVGSTNTRTNFAAVCAECN

SEQ ID NO: 186 - protein, 28 aa, Artificial Sequence
  HNH-LIKE domain
EMDHIVPRKGVGSTNTRVNLAAACAACN

SEQ ID NO: 187 - protein, 28 aa, Artificial Sequence
  HNH-LIKE domain
EMDHIVPRAGQGSTNTRENLVAVCHRCN

SEQ ID NO: 188 - protein, 33 aa, Artificial Sequence
  HNH-LIKE domain
EIDHILPRSLIKDARGIVFNAEPNLIYASSRGN

SEQ ID NO: 189 - protein, 33 aa, Artificial Sequence
  HNH-LIKE domain
EIDHIIPRSLTGRTKKTVFNSEANLIYCSSKGN

SEQ ID NO: 190 - protein, 33 aa, Artificial Sequence
  HNH-LIKE domain
EIDHIIPRSLTLKKSESIYNSEVNLIFVSAQGN

SEQ ID NO: 191 - protein, 33 aa, Legionella pneumophila str. Paris
EIDHIYPRSLSKKHFGVIFNSEVNLIYCSSQGN

SEQ ID NO: 192 - protein, 33 aa, Wolinella succinogenes DSM 1740
EIDHILPRSHTLKIYGTVFNPEGNLIYVHQKCN

SEQ ID NO: 193 - protein, 30 aa, Artificial Sequence
  HNH-LIKE domain
ELDHIIPRSHKKYGTLNDEANLICVTRGDN

SEQ ID NO: 194 - protein, 27 aa, Akkermansia muciniphila
ELEHIVPHSFRQSNALSSLVLTWPGVN

SEQ ID NO: 195 - protein, 27 aa, Solobacterium moorei F0204
DIDHIYPRSKIKDDSITNRVLVEKDIN

SEQ ID NO: 196 - protein, 28 aa, Veillonella atypica ACS-134-V-Col7a
YDIDHIYPRSLTKDDSFDNLVLCERTAN

SEQ ID NO: 197 - protein, 28 aa, Fusobacterium nucleatum
DIDHIYPRSKVIKDDSFDNLVLVLKNEN

SEQ ID NO: 198 - protein, 27 aa, Filifactor alocis
DRDHIYPQSKIKDDSIDNLVLVNKTYN

SEQ ID NO: 199 - DNA, 5 bp, S. thermophilus
  misc_feature (1)..(1): n is a, c, g, or t
  misc_feature (4)..(4): n is a, c, g, or t
nggng

SEQ ID NO: 200 - DNA, 7 bp, S. thermophilus
  misc_feature (1)..(2): n is a, c, g, or t
nnagaaw

SEQ ID NO: 201 - DNA, 4 bp, S. mutans
  misc_feature (1)..(1): n is a, c, g, or t
naar

SEQ ID NO: 202 - DNA, 5 bp, S. aureus
  misc_feature (1)..(2): n is a, c, g, or t
nngrr

SEQ ID NO: 203 - DNA, 6 bp, S. aureus
  misc_feature (1)..(2): n is a, c, g, or t
  misc_feature (6)..(6): n is a, c, g, or t
nngrrn

SEQ ID NO: 204 - DNA, 6 bp, Artificial Sequence
  Synthetic
  misc_feature (1)..(2): n is a, c, g, or t
nngrrt

SEQ ID NO: 205 - DNA, 6 bp, Artificial Sequence
  Synthetic
  misc_feature (1)..(2): n is a, c, g, or t
nngrrv

SEQ ID NO: 206 - DNA, 3255 bp, Staphylococcus aureus
atggccccaaagaagaagcggaaggtcggtatccacggagtcccagcagccaagcggaactacatcctgggcctggacatcggcatcaccagcgtgggctacggcatcatcgactacgagacacgggacgtgatcgatgccggcgtgcggctgttcaaagaggccaacgtggaaaacaacgagggcaggcggagcaagagaggcgccagaaggctgaagcggcggaggcggcatagaatccagagagtgaagaagctgctgttcgactacaacctgctgaccgaccacagcgagctgagcggcatcaacccctacgaggccagagtgaagggcctgagccagaagctgagcgaggaagagttctctgccgccctgctgcacctggccaagagaagaggcgtgcacaacgtgaacgaggtggaagaggacaccggcaacgagctgtccaccagagagcagatcagccggaacagcaaggccctggaagagaaatacgtggccgaactgcagctggaacggctgaagaaagacggcgaagtgcggggcagcatcaacagattcaagaccagcgactacgtgaaagaagccaaacagctgctgaaggtgcagaaggcctaccaccagctggaccagagcttcatcgacacctacatcgacctgctggaaacccggcggacctactatgagggacctggcgagggcagccccttcggctggaaggacatcaaagaatggtacgagatgctgatgggccactgcacctacttccccgaggaactgcggagcgtgaagtacgcctacaacgccgacctgtacaacgccctgaacgacctgaacaatctcgtgatcaccagggacgagaacgagaagctggaatattacgagaagttccagatcatcgagaacgtgttcaagcagaagaagaagcccaccctgaagcagatcgccaaagaaatcctcgtgaacgaagaggatattaagggctacagagtgaccagcaccggcaagcccgagttcaccaacctgaaggtgtaccacgacatcaaggacattaccgcccggaaagagattattgagaacgccgagctgctggatcagattgccaagatcctgaccatctaccagagcagcgaggacatccaggaagaactgaccaatctgaactccgagctgacccaggaagagatcgagcagatctctaatctgaagggctataccggcacccacaacctgagcctgaaggccatcaacctgatcctggacgagctgtggcacaccaacgacaaccagatcgctatcttcaaccggctgaagctggtgcccaagaaggtggacctgtcccagcagaaagagatccccaccaccctggtggacgacttcatcctgagccccgtcgtgaagagaagcttcatccagagcatcaaagtgatcaacgccatcatcaagaagtacggcctgcccaacgacatcattatcgagctggcccgcgagaagaactccaaggacgcccagaaaatgatcaacgagatgcagaagcggaaccggcagaccaacgagcggatcgaggaaatcatccggaccaccggcaaagagaacgccaagtacctgatcgagaagatcaagctgcacgacatgcaggaaggcaagtgcctgtacagcctggaagccatccctctggaagatctgctgaacaaccccttcaactatgaggtggaccacatcatccccagaagcgtgtccttcgacaacagcttcaacaacaaggtgctcgtgaagcaggaagaaaacagcaagaagggcaaccggaccccattccagtacctgagcagcagcgacagcaagatcagctacgaaaccttcaagaagcacatcctgaatctggccaagggcaagggcagaatcagcaagaccaagaaagagtatctgctggaagaacgggacatcaacaggttctccgtgcagaaagacttcatcaaccggaacctggtggataccagatacgccaccagaggcctgatgaacctgctgcggagctacttcagagtgaacaacctggacgtgaaagtgaagtccatcaatggcggcttcaccagctttctgcggcggaagtggaagtttaagaaagagcggaacaaggggtacaagcaccacgccgaggacgccctgatcattgccaacgccgatttcatcttcaaagagtggaagaaactggacaaggccaaaaaagtgatggaaaaccagatgttcgaggaaaggcaggccgagagcatgcccgagatcgaaaccgagcaggagtacaaagagatcttcatcaccccccaccagatcaagcacattaaggacttcaaggactacaagtacagccaccgggtggacaagaagcctaatagagagctgattaacgacaccctgtactccacccggaaggacgacaagggcaacaccctgatcgtgaacaatctgaacggcctgtacgacaaggacaatgacaagctgaaaaagctgatcaacaagagccccgaaaagctgctgatgtaccaccacgacccccagacctaccagaaactgaagctgattatggaacagtacggcgacgagaagaatcccctgtacaagtactacgaggaaaccgggaactacctgaccaagtactccaaaaaggacaacggccccgtgatcaagaagattaagtattacggcaacaaactgaacgcccatctggacatcaccgacgactaccccaacagcagaaacaaggtcgtgaagctgtccctgaagccctacagattcgacgtgtacctggacaatggcgtgtacaagttcgtgaccgtgaagaatctggatgtgatcaaaaaagaaaactactacgaagtgaatagcaagtgctatgaggaagctaagaagctgaagaagatcagcaaccaggccgagtttatcgcctccttctacaacaacgatctgatcaagatcaacggcgagctgtatagagtgatcggcgtgaacaacgacctgctgaaccggatcgaagtgaacatgatcgacatcacctaccgcgagtacctggaaaacatgaacgacaagaggccccccaggatcattaagacaatcgcctccaagacccagagcattaagaagtacagcacagacattctgggcaacctgtatgaagtgaaatctaagaagcaccctcagatcatcaaaaagggcaaaaggccggcggccacgaaaaaggccggccaggcaaaaaagaaaaag

SEQ ID NO: 207 - DNA, 3242 bp, Staphylococcus aureus
accggtgccaccatgtacccatacgatgttccagattacgcttcgccgaagaaaaagcgcaaggtcgaagcgtccatgaaaaggaactacattctggggctggacatcgggattacaagcgtggggtatgggattattgactatgaaacaagggacgtgatcgacgcaggcgtcagactgttcaaggaggccaacgtggaaaacaatgagggacggagaagcaagaggggagccaggcgcctgaaacgacggagaaggcacagaatccagagggtgaagaaactgctgttcgattacaacctgctgaccgaccattctgagctgagtggaattaatccttatgaagccagggtgaaaggcctgagtcagaagctgtcagaggaagagttttccgcagctctgctgcacctggctaagcgccgaggagtgcataacgtcaatgaggtggaagaggacaccggcaacgagctgtctacaaaggaacagatctcacgcaatagcaaagctctggaagagaagtatgtcgcagagctgcagctggaacggctgaagaaagatggcgaggtgagagggtcaattaataggttcaagacaagcgactacgtcaaagaagccaagcagctgctgaaagtgcagaaggcttaccaccagctggatcagagcttcatcgatacttatatcgacctgctggagactcggagaacctactatgagggaccaggagaagggagccccttcggatggaaagacatcaaggaatggtacgagatgctgatgggacattgcacctattttccagaagagctgagaagcgtcaagtacgcttataacgcagatcttacaacgccctgaatgacctgaacaacctggtcatcaccagggatgaaaacgagaaactggaatactatgagaagttccagatcatcgaaaacgtgtttaagcagaagaaaaagcctacactgaaacagattgctaaggagatcctggtcaacgaagaggacatcaagggctaccgggtgacaagcactggaaaaccagagttcaccaatctgaaagtgtatcacgatattaaggacatcacagcacggaaagaaatcattgagaacgccgaactgctggatcagattgctaagatcctgactatctaccagagctccgaggacatccaggaagagctgactaacctgaacagcgagctgacccaggaagagatcgaacagattagtaatctgaaggggtacaccggaacacacaacctgtccctgaaagctatcaatctgattctggatgagctgtggcatacaaacgacaatcagattgcaatctttaaccggctgaagctggtcccaaaaaaggtggacctgagtcagcagaaagagatcccaaccacactggtggacgatttcattctgtcacccgtggtcaagcggagcttcatccagagcatcaaagtgatcaacgccatcatcaagaagtacggcctgcccaatgatatcattatcgagctggctagggagaagaacagcaaggacgcacagaagatgatcaatgagatgcagaaacgaaaccggcagaccaatgaacgcattgaagagattatccgaactaccgggaaagagaacgcaaagtacctgattgaaaaaatcaagctgcacgatatgcaggagggaaagtgtctgtattctctggaggccatccccctggaggacctgctgaacaatccattcaactacgaggtcgatcatattatccccagaagcgtgtccttcgacaattcctttaacaacaaggtgctggtcaagcaggaagagaactctaaaaagggcaataggactcctttccagtacctgtctagttcagattccaagatctcttacgaaacctttaaaaagcacattctgaatctggccaaaggaaagggccgcatcagcaagaccaaaaaggagtacctgctggaagagcgggacatcaacagattctccgtccagaaggattttattaaccggaatctggtggacacaagatacgctactcgcggcctgatgaatctgctgcgatcctatttccgggtgaacaatctggatgtgaaagtcaagtccatcaacggcgggttcacatcttttctgaggcgcaaatggaagtttaaaaaggagcgcaacaaagggtacaagcaccatgccgaagatgctctgattatcgcaaatgccgacttcatctttaaggagtggaaaaagctggacaaagccaagaaagtgatggagaaccagatgttcgaagagaagcaggccgaatctatgcccgaaatcgagacagaacaggagtacaaggagattttcatcactcctcaccagatcaagcatatcaaggatttcaaggactacaagtactctcaccgggtggataaaaagcccaacagagagctgatcaatgacaccctgtatagtacaagaaaagacgataaggggaataccctgattgtgaacaatctgaacggactgtacgacaaagataatgacaagctgaaaaagctgatcaacaaaagtcccgagaagctgctgatgtaccaccatgatcctcagacatatcagaaactgaagctgattatggagcagtacggcgacgagaagaacccactgtataagtactatgaagagactgggaactacctgaccaagtatagcaaaaaggataatggccccgtgatcaagaagatcaagtactatgggaacaagctgaatgcccatctggacatcacagacgattaccctaacagtcgcaacaaggtggtcaagctgtcactgaagccatacagattcgatgtctatctggacaacggcgtgtataaatttgtgactgtcaagaatctggatgtcatcaaaaaggagaactactatgaagtgaatagcaagtgctacgaagaggctaaaaagctgaaaaagattagcaaccaggcagagttcatcgcctccttttacaacaacgacctgattaagatcaatggcgaactgtatagggtcatcggggtgaacaatgatctgctgaaccgcattgaagtgaatatgattgacatcacttaccgagagtatctggaaaacatgaatgataagcgcccccctcgaattatcaaaacaattgcctctaagactcagagtatcaaaaagtactcaaccgacattctgggaaacctgtatgaggtgaagagcaaaaagcaccctcagattatcaaaaagggctaagaattc

SEQ ID NO: 208 - RNA, 17 nt, Artificial Sequence
  Sythetic
acuaugcugccgcccag

SEQ ID NO: 209 - RNA, 17 nt, Artificial Sequence
  Sythetic
uccuccugacaaucgau

SEQ ID NO: 210 - RNA, 17 nt, Artificial Sequence
  Sythetic
cuaugcugccgcccagu

SEQ ID NO: 211 - RNA, 17 nt, Artificial Sequence
  Sythetic
gccgcccagugggacuu

SEQ ID NO: 212 - RNA, 20 nt, Artificial Sequence
  Sythetic
uugacagggcucuauuuuau

SEQ ID NO: 213 - RNA, 20 nt, Artificial Sequence
  Sythetic
ucacuaugcugccgcccagu

SEQ ID NO: 214 - RNA, 17 nt, Artificial Sequence
  Sythetic
uccugauaaacugcaaa

SEQ ID NO: 215 - RNA, 17 nt, Artificial Sequence
  Sythetic
acuugucaccaccccaa

SEQ ID NO: 216 - RNA, 17 nt, Artificial Sequence
  Sythetic
gcauagugagcccagaa

SEQ ID NO: 217 - RNA, 17 nt, Artificial Sequence
  Sythetic
cuuuuuauuuaugcaca

SEQ ID NO: 218 - RNA, 17 nt, Artificial Sequence
  Sythetic
ugugucaacucuugaca

SEQ ID NO: 219 - RNA, 17 nt, Artificial Sequence
  Sythetic
uuaaagcaaacacagca

SEQ ID NO: 220 - RNA, 17 nt, Artificial Sequence
  Sythetic
acauugauuuuuuggca

SEQ ID NO: 221 - RNA, 17 nt, Artificial Sequence
  Sythetic
accagaucucaaaaaga

SEQ ID NO: 222 - RNA, 17 nt, Artificial Sequence
  Sythetic
cacaggguggaacaaga

SEQ ID NO: 223 - RNA, 17 nt, Artificial Sequence
  Sythetic
agaaggggacaguaaga

SEQ ID NO: 224 - RNA, 17 nt, Artificial Sequence
  Sythetic
agcauagugagcccaga

SEQ ID NO: 225 - RNA, 17 nt, Artificial Sequence
  Sythetic
gaaaaacaggucagaga

SEQ ID NO: 226 - RNA, 17 nt, Artificial Sequence
  Sythetic
ugcuuuaaaagccagga

SEQ ID NO: 227 - RNA, 17 nt, Artificial Sequence
  Sythetic
caguaagaaggaaaaac

SEQ ID NO: 228 - RNA, 17 nt, Artificial Sequence
  Sythetic
uauuuccaaagucccac

SEQ ID NO: 229 - RNA, 17 nt, Artificial Sequence
  Sythetic
acuuuuuauuuaugcac

SEQ ID NO: 230 - RNA, 17 nt, Artificial Sequence
  Sythetic
gccuccgcucuacucac

SEQ ID NO: 231 - RNA, 17 nt, Artificial Sequence
  Sythetic
augugucaacucuugac

SEQ ID NO: 232 - RNA, 17 nt, Artificial Sequence
  Sythetic
caucuaccugcucaacc

SEQ ID NO: 233 - RNA, 17 nt, Artificial Sequence
  Sythetic
gacaaucgauagguacc

SEQ ID NO: 234 - RNA, 17 nt, Artificial Sequence
  Sythetic
guguuugcgucucuccc

SEQ ID NO: 235 - RNA, 17 nt, Artificial Sequence
  Sythetic
uguuugcuuuaaaagcc

SEQ ID NO: 236 - RNA, 17 nt, Artificial Sequence
  Sythetic
cagcauggacgacagcc

SEQ ID NO: 237 - RNA, 17 nt, Artificial Sequence
  Sythetic
acaggucagagauggcc

SEQ ID NO: 238 - RNA, 17 nt, Artificial Sequence
  Sythetic
cccaaaggugaccgucc

SEQ ID NO: 239 - RNA, 17 nt, Artificial Sequence
  Sythetic
cugguaaagaugauucc

SEQ ID NO: 240 - RNA, 17 nt, Artificial Sequence
  Sythetic
agauggccagguugagc

SEQ ID NO: 241 - RNA, 17 nt, Artificial Sequence
  Sythetic
gagcggaggcaggaggc

SEQ ID NO: 242 - RNA, 17 nt, Artificial Sequence
  Sythetic
gugaguagagcggaggc

SEQ ID NO: 243 - RNA, 17 nt, Artificial Sequence
  Sythetic
cacauugauuuuuuggc

SEQ ID NO: 244 - RNA, 17 nt, Artificial Sequence
  Sythetic
uuuugugggcaacaugc

SEQ ID NO: 245 - RNA, 17 nt, Artificial Sequence
  Sythetic
accuucuuuuugagauc

SEQ ID NO: 246 - RNA, 17 nt, Artificial Sequence
  Sythetic
gccuuuugcaguuuauc

SEQ ID NO: 247 - RNA, 17 nt, Artificial Sequence
  Sythetic
uuuauaggcuucuucuc

SEQ ID NO: 248 - RNA, 17 nt, Artificial Sequence
  Sythetic
gguaccuaucgauuguc

SEQ ID NO: 249 - RNA, 17 nt, Artificial Sequence
  Sythetic
uucuuacuguccccuuc

SEQ ID NO: 250 - RNA, 17 nt, Artificial Sequence
  Sythetic
cauagugagcccagaag

SEQ ID NO: 251 - RNA, 17 nt, Artificial Sequence
  Sythetic
aacaccagugaguagag

SEQ ID NO: 252 - RNA, 17 nt, Artificial Sequence
  Sythetic
aguagagcggaggcagg

SEQ ID NO: 253 - RNA, 17 nt, Artificial Sequence
  Sythetic
accuaucgauugucagg

SEQ ID NO: 254 - RNA, 17 nt, Artificial Sequence
  Sythetic
agagcggaggcaggagg

SEQ ID NO: 255 - RNA, 17 nt, Artificial Sequence
  Sythetic
accagugaguagagcgg

SEQ ID NO: 256 - RNA, 17 nt, Artificial Sequence
  Sythetic
uuuauuuaugcacaggg

SEQ ID NO: 257 - RNA, 17 nt, Artificial Sequence
  Sythetic
gacggucaccuuugggg

SEQ ID NO: 258 - RNA, 17 nt, Artificial Sequence
  Sythetic
uccaaagucccacuggg

SEQ ID NO: 259 - RNA, 17 nt, Artificial Sequence
  Sythetic
aagugugaucacuuggg

SEQ ID NO: 260 - RNA, 17 nt, Artificial Sequence
  Sythetic
ugugaucacuugggugg

SEQ ID NO: 261 - RNA, 17 nt, Artificial Sequence
  Sythetic
ugcaguuuaucaggaug

SEQ ID NO: 262 - RNA, 17 nt, Artificial Sequence
  Sythetic
caggacggucaccuuug

SEQ ID NO: 263 - RNA, 17 nt, Artificial Sequence
  Sythetic
guucaucuuugguuuug

SEQ ID NO: 264 - RNA, 17 nt, Artificial Sequence
  Sythetic
caucaauuauuauacau

SEQ ID NO: 265 - RNA, 17 nt, Artificial Sequence
  Sythetic
uaauugaugucauagau

SEQ ID NO: 266 - RNA, 17 nt, Artificial Sequence
  Sythetic
acagggcucuauuuuau

SEQ ID NO: 267 - RNA, 17 nt, Artificial Sequence
  Sythetic
auuuccaaagucccacu

SEQ ID NO: 268 - RNA, 17 nt, Artificial Sequence
  Sythetic
ugacaagugugaucacu

SEQ ID NO: 269 - RNA, 17 nt, Artificial Sequence
  Sythetic
ugguaaagaugauuccu

SEQ ID NO: 270 - RNA, 17 nt, Artificial Sequence
  Sythetic
ucuuacuguccccuucu

SEQ ID NO: 271 - RNA, 17 nt, Artificial Sequence
  Sythetic
uucaucuuugguuuugu

SEQ ID NO: 272 - RNA, 17 nt, Artificial Sequence
  Sythetic
gacaagugugaucacuu

SEQ ID NO: 273 - RNA, 17 nt, Artificial Sequence
  Sythetic
gccaggacggucaccuu

SEQ ID NO: 274 - RNA, 17 nt, Artificial Sequence
  Sythetic
ucacugguguucaucuu

SEQ ID NO: 275 - RNA, 17 nt, Artificial Sequence
  Sythetic
ccaggacggucaccuuu

SEQ ID NO: 276 - RNA, 17 nt, Artificial Sequence
  Sythetic
gcuucacauugauuuuu

SEQ ID NO: 277 - RNA, 20 nt, Artificial Sequence
  Sythetic
ucauccugauaaacugcaaa

SEQ ID NO: 278 - RNA, 20 nt, Artificial Sequence
  Sythetic
cacacuugucaccaccccaa

SEQ ID NO: 279 - RNA, 20 nt, Artificial Sequence
  Sythetic
gcagcauagugagcccagaa

SEQ ID NO: 280 - RNA, 20 nt, Artificial Sequence
  Sythetic
caaugugucaacucuugaca

SEQ ID NO: 281 - RNA, 20 nt, Artificial Sequence
  Sythetic
cuuuuaaagcaaacacagca

SEQ ID NO: 282 - RNA, 20 nt, Artificial Sequence
  Sythetic
uucacauugauuuuuuggca

SEQ ID NO: 283 - RNA, 20 nt, Artificial Sequence
  Sythetic
uuuaccagaucucaaaaaga

SEQ ID NO: 284 - RNA, 20 nt, Artificial Sequence
  Sythetic
augcacaggguggaacaaga

SEQ ID NO: 285 - RNA, 20 nt, Artificial Sequence
  Sythetic
cccagaaggggacaguaaga

SEQ ID NO: 286 - RNA, 20 nt, Artificial Sequence
  Sythetic
ggcagcauagugagcccaga

SEQ ID NO: 287 - RNA, 20 nt, Artificial Sequence
  Sythetic
aaggaaaaacaggucagaga

SEQ ID NO: 288 - RNA, 20 nt, Artificial Sequence
  Sythetic
guuugcuuuaaaagccagga

SEQ ID NO: 289 - RNA, 20 nt, Artificial Sequence
  Sythetic
ggacaguaagaaggaaaaac

SEQ ID NO: 290 - RNA, 20 nt, Artificial Sequence
  Sythetic
uuguauuuccaaagucccac

SEQ ID NO: 291 - RNA, 20 nt, Artificial Sequence
  Sythetic
ccugccuccgcucuacucac

SEQ ID NO: 292 - RNA, 20 nt, Artificial Sequence
  Sythetic
acaaugugucaacucuugac

SEQ ID NO: 293 - RNA, 20 nt, Artificial Sequence
  Sythetic
ugacaucuaccugcucaacc

SEQ ID NO: 294 - RNA, 20 nt, Artificial Sequence
  Sythetic
ccugacaaucgauagguacc

SEQ ID NO: 295 - RNA, 20 nt, Artificial Sequence
  Sythetic
gcuguguuugcgucucuccc

SEQ ID NO: 296 - RNA, 20 nt, Artificial Sequence
  Sythetic
cuguguuugcuuuaaaagcc

SEQ ID NO: 297 - RNA, 20 nt, Artificial Sequence
  Sythetic
acacagcauggacgacagcc

SEQ ID NO: 298 - RNA, 20 nt, Artificial Sequence
  Sythetic
aaaacaggucagagauggcc

SEQ ID NO: 299 - RNA, 20 nt, Artificial Sequence
  Sythetic
caccccaaaggugaccgucc

SEQ ID NO: 300 - RNA, 20 nt, Artificial Sequence
  Sythetic
gaucugguaaagaugauucc

SEQ ID NO: 301 - RNA, 20 nt, Artificial Sequence
  Sythetic
cagagauggccagguugagc

SEQ ID NO: 302 - RNA, 20 nt, Artificial Sequence
  Sythetic
guagagcggaggcaggaggc

SEQ ID NO: 303 - RNA, 20 nt, Artificial Sequence
  Sythetic
ccagugaguagagcggaggc

SEQ ID NO: 304 - RNA, 20 nt, Artificial Sequence
  Sythetic
cuucacauugauuuuuuggc

SEQ ID NO: 305 - RNA, 20 nt, Artificial Sequence
  Sythetic
ugguuuugugggcaacaugc

SEQ ID NO: 306 - RNA, 20 nt, Artificial Sequence
  Sythetic
aagaccuucuuuuugagauc

SEQ ID NO: 307 - RNA, 20 nt, Artificial Sequence
  Sythetic
ucagccuuuugcaguuuauc

SEQ ID NO: 308 - RNA, 20 nt, Artificial Sequence
  Sythetic
uauuuuauaggcuucuucuc

SEQ ID NO: 309 - RNA, 20 nt, Artificial Sequence
  Sythetic
ccagguaccuaucgauuguc

SEQ ID NO: 310 - RNA, 20 nt, Artificial Sequence
  Sythetic
uccuucuuacuguccccuuc

SEQ ID NO: 311 - RNA, 20 nt, Artificial Sequence
  Sythetic
cagcauagugagcccagaag

SEQ ID NO: 312 - RNA, 20 nt, Artificial Sequence
  Sythetic
cucacuaugcugccgcccag

SEQ ID NO: 313 - RNA, 20 nt, Artificial Sequence
  Sythetic
augaacaccagugaguagag

SEQ ID NO: 314 - RNA, 20 nt, Artificial Sequence
  Sythetic
gugaguagagcggaggcagg

SEQ ID NO: 315 - RNA, 20 nt, Artificial Sequence
  Sythetic
gguaccuaucgauugucagg

SEQ ID NO: 316 - RNA, 20 nt, Artificial Sequence
  Sythetic
aguagagcggaggcaggagg

SEQ ID NO: 317 - RNA, 20 nt, Artificial Sequence
  Sythetic
aacaccagugaguagagcgg

SEQ ID NO: 318 - RNA, 20 nt, Artificial Sequence
  Sythetic
cuuuuuauuuaugcacaggg

SEQ ID NO: 319 - RNA, 20 nt, Artificial Sequence
  Sythetic
caggacggucaccuuugggg

SEQ ID NO: 320 - RNA, 20 nt, Artificial Sequence
  Sythetic
auuuccaaagucccacuggg

SEQ ID NO: 321 - RNA, 20 nt, Artificial Sequence
  Sythetic
gacaagugugaucacuuggg

SEQ ID NO: 322 - RNA, 20 nt, Artificial Sequence
  Sythetic
aagugugaucacuugggugg

SEQ ID NO: 323 - RNA, 20 nt, Artificial Sequence
  Sythetic
uuuugcaguuuaucaggaug

SEQ ID NO: 324 - RNA, 20 nt, Artificial Sequence
  Sythetic
agccaggacggucaccuuug

SEQ ID NO: 325 - RNA, 20 nt, Artificial Sequence
  Sythetic
gguguucaucuuugguuuug

SEQ ID NO: 326 - RNA, 20 nt, Artificial Sequence
  Sythetic
ugacaucaauuauuauacau

SEQ ID NO: 327 - RNA, 20 nt, Artificial Sequence
  Sythetic
uaauaauugaugucauagau

SEQ ID NO: 328 - RNA, 20 nt, Artificial Sequence
  Sythetic
ucauccuccugacaaucgau

SEQ ID NO: 329 - RNA, 20 nt, Artificial Sequence
  Sythetic
uguauuuccaaagucccacu

SEQ ID NO: 330 - RNA, 20 nt, Artificial Sequence
  Sythetic
uggugacaagugugaucacu

SEQ ID NO: 331 - RNA, 20 nt, Artificial Sequence
  Sythetic
aucugguaaagaugauuccu

SEQ ID NO: 332 - RNA, 20 nt, Artificial Sequence
  Sythetic
ccuucuuacuguccccuucu

SEQ ID NO: 333 - RNA, 20 nt, Artificial Sequence
  Sythetic
guguucaucuuugguuuugu

SEQ ID NO: 334 - RNA, 20 nt, Artificial Sequence
  Sythetic
ggugacaagugugaucacuu

SEQ ID NO: 335 - RNA, 20 nt, Artificial Sequence
  Sythetic
gcugccgcccagugggacuu

SEQ ID NO: 336 - RNA, 20 nt, Artificial Sequence
  Sythetic
aaagccaggacggucaccuu

SEQ ID NO: 337 - RNA, 20 nt, Artificial Sequence
  Sythetic
uacucacugguguucaucuu

SEQ ID NO: 338 - RNA, 20 nt, Artificial Sequence
  Sythetic
aagccaggacggucaccuuu

SEQ ID NO: 339 - RNA, 20 nt, Artificial Sequence
  Sythetic
uuugcuucacauugauuuuu

SEQ ID NO: 340 - RNA, 17 nt, Artificial Sequence
  Sythetic
gaacuucuccccgacaa

SEQ ID NO: 341 - RNA, 17 nt, Artificial Sequence
  Sythetic
ugagaagaagaggcaca

SEQ ID NO: 342 - RNA, 17 nt, Artificial Sequence
  Sythetic
ucugugggcuugugaca

SEQ ID NO: 343 - RNA, 17 nt, Artificial Sequence
  Sythetic
ccugccgcugcuuguca

SEQ ID NO: 344 - RNA, 17 nt, Artificial Sequence
  Sythetic
accagaucucaaaaaga

SEQ ID NO: 345 - RNA, 17 nt, Artificial Sequence
  Sythetic
ggaagguguucaggaga

SEQ ID NO: 346 - RNA, 17 nt, Artificial Sequence
  Sythetic
gccaaagaauuccugga

SEQ ID NO: 347 - RNA, 17 nt, Artificial Sequence
  Sythetic
aaaauaaacaaucauga

SEQ ID NO: 348 - RNA, 17 nt, Artificial Sequence
  Sythetic
gacaaaggcauagauga

SEQ ID NO: 349 - RNA, 17 nt, Artificial Sequence
  Sythetic
aauugauacugacugua

SEQ ID NO: 350 - RNA, 17 nt, Artificial Sequence
  Sythetic
agaaggacaauguugua

SEQ ID NO: 351 - RNA, 17 nt, Artificial Sequence
  Sythetic
auugcaguagcucuaac

SEQ ID NO: 352 - RNA, 17 nt, Artificial Sequence
  Sythetic
guuuacacccgauccac

SEQ ID NO: 353 - RNA, 17 nt, Artificial Sequence
  Sythetic
augagaagaagaggcac

SEQ ID NO: 354 - RNA, 17 nt, Artificial Sequence
  Sythetic
ucaggccaaagaauucc

SEQ ID NO: 355 - RNA, 17 nt, Artificial Sequence
  Sythetic
cugguaaagaugauucc

SEQ ID NO: 356 - RNA, 17 nt, Artificial Sequence
  Sythetic
ucuccugaacaccuucc

SEQ ID NO: 357 - RNA, 17 nt, Artificial Sequence
  Sythetic
ccgauccacuggggagc

SEQ ID NO: 358 - RNA, 17 nt, Artificial Sequence
  Sythetic
ccaugacaagcagcggc

SEQ ID NO: 359 - RNA, 17 nt, Artificial Sequence
  Sythetic
gauagucaucuuggggc

SEQ ID NO: 360 - RNA, 17 nt, Artificial Sequence
  Sythetic
cacggacucaagugggc

SEQ ID NO: 361 - RNA, 17 nt, Artificial Sequence
  Sythetic
guuggaccaagcuaugc

SEQ ID NO: 362 - RNA, 17 nt, Artificial Sequence
  Sythetic
uggaaaaugagagcugc

SEQ ID NO: 363 - RNA, 17 nt, Artificial Sequence
  Sythetic
gcucgggagccucuugc

SEQ ID NO: 364 - RNA, 17 nt, Artificial Sequence
  Sythetic
accuucuuuuugagauc

SEQ ID NO: 365 - RNA, 17 nt, Artificial Sequence
  Sythetic
cugcuccccaguggauc

SEQ ID NO: 366 - RNA, 17 nt, Artificial Sequence
  Sythetic
auggucaucugcuacuc

SEQ ID NO: 367 - RNA, 17 nt, Artificial Sequence
  Sythetic
acugagcuugcucgcuc

SEQ ID NO: 368 - RNA, 17 nt, Artificial Sequence
  Sythetic
ugacuaucuuuaauguc

SEQ ID NO: 369 - RNA, 17 nt, Artificial Sequence
  Sythetic
ucaucuaugccuuuguc

SEQ ID NO: 370 - RNA, 17 nt, Artificial Sequence
  Sythetic
acagucaguaucaauuc

SEQ ID NO: 371 - RNA, 17 nt, Artificial Sequence
  Sythetic
agcuacugcaauuauuc

SEQ ID NO: 372 - RNA, 17 nt, Artificial Sequence
  Sythetic
uuguuuauuuucucuuc

SEQ ID NO: 373 - RNA, 17 nt, Artificial Sequence
  Sythetic
auuccuggaagguguuc

SEQ ID NO: 374 - RNA, 17 nt, Artificial Sequence
  Sythetic
uucuauuuuccagcaag

SEQ ID NO: 375 - RNA, 17 nt, Artificial Sequence
  Sythetic
ugugacacggacucaag

SEQ ID NO: 376 - RNA, 17 nt, Artificial Sequence
  Sythetic
gucgaaaugagaagaag

SEQ ID NO: 377 - RNA, 17 nt, Artificial Sequence
  Sythetic
uuuggaagaagacuaag

SEQ ID NO: 378 - RNA, 17 nt, Artificial Sequence
  Sythetic
uauuuccugcuccccag

SEQ ID NO: 379 - RNA, 17 nt, Artificial Sequence
  Sythetic
augaccaugacaagcag

SEQ ID NO: 380 - RNA, 17 nt, Artificial Sequence
  Sythetic
caucuaugccuuugucg

SEQ ID NO: 381 - RNA, 17 nt, Artificial Sequence
  Sythetic
caaaggcauagaugaug

SEQ ID NO: 382 - RNA, 17 nt, Artificial Sequence
  Sythetic
uuacacccgauccacug

SEQ ID NO: 383 - RNA, 17 nt, Artificial Sequence
  Sythetic
ggagcaggaaauaucug

SEQ ID NO: 384 - RNA, 17 nt, Artificial Sequence
  Sythetic
agaggcacagggcugug

SEQ ID NO: 385 - RNA, 17 nt, Artificial Sequence
  Sythetic
uaaagauagucaucuug

SEQ ID NO: 386 - RNA, 17 nt, Artificial Sequence
  Sythetic
ccugcuccccaguggau

SEQ ID NO: 387 - RNA, 17 nt, Artificial Sequence
  Sythetic
acaaaggcauagaugau

SEQ ID NO: 388 - RNA, 17 nt, Artificial Sequence
  Sythetic
uuuacacccgauccacu

SEQ ID NO: 389 - RNA, 17 nt, Artificial Sequence
  Sythetic
cauggucaucugcuacu

SEQ ID NO: 390 - RNA, 17 nt, Artificial Sequence
  Sythetic
ugguaaagaugauuccu

SEQ ID NO: 391 - RNA, 17 nt, Artificial Sequence
  Sythetic
cugucaccugcauagcu

SEQ ID NO: 392 - RNA, 17 nt, Artificial Sequence
  Sythetic
aacugagcuugcucgcu

SEQ ID NO: 393 - RNA, 17 nt, Artificial Sequence
  Sythetic
auuaaagauagucaucu

SEQ ID NO: 394 - RNA, 17 nt, Artificial Sequence
  Sythetic
caggugacagagacucu

SEQ ID NO: 395 - RNA, 17 nt, Artificial Sequence
  Sythetic
uguuuauuuucucuucu

SEQ ID NO: 396 - RNA, 17 nt, Artificial Sequence
  Sythetic
gugacacggacucaagu

SEQ ID NO: 397 - RNA, 17 nt, Artificial Sequence
  Sythetic
caguagcucuaacaggu

SEQ ID NO: 398 - RNA, 17 nt, Artificial Sequence
  Sythetic
gagcaggaaauaucugu

SEQ ID NO: 399 - RNA, 17 nt, Artificial Sequence
  Sythetic
gagaaggacaauguugu

SEQ ID NO: 400 - RNA, 17 nt, Artificial Sequence
  Sythetic
aucaucuaugccuuugu

SEQ ID NO: 401 - RNA, 17 nt, Artificial Sequence
  Sythetic
uccuaaaaacucugcuu

SEQ ID NO: 402 - RNA, 17 nt, Artificial Sequence
  Sythetic
uuaaagauagucaucuu

SEQ ID NO: 403 - RNA, 17 nt, Artificial Sequence
  Sythetic
aggugacagagacucuu

SEQ ID NO: 404 - RNA, 17 nt, Artificial Sequence
  Sythetic
accuuccaggaauucuu

SEQ ID NO: 405 - RNA, 17 nt, Artificial Sequence
  Sythetic
gcauuugcagaagcguu

SEQ ID NO: 406 - RNA, 17 nt, Artificial Sequence
  Sythetic
guuuggcaaugugcuuu

SEQ ID NO: 407 - RNA, 17 nt, Artificial Sequence
  Sythetic
accgaagcagaguuuuu

SEQ ID NO: 408 - RNA, 20 nt, Artificial Sequence
  Sythetic
ucugaacuucuccccgacaa

SEQ ID NO: 409 - RNA, 20 nt, Artificial Sequence
  Sythetic
aaaugagaagaagaggcaca

SEQ ID NO: 410 - RNA, 20 nt, Artificial Sequence
  Sythetic
auaucugugggcuugugaca

SEQ ID NO: 411 - RNA, 20 nt, Artificial Sequence
  Sythetic
gguccugccgcugcuuguca

SEQ ID NO: 412 - RNA, 20 nt, Artificial Sequence
  Sythetic
uuuaccagaucucaaaaaga

SEQ ID NO: 413 - RNA, 20 nt, Artificial Sequence
  Sythetic
ccuggaagguguucaggaga

SEQ ID NO: 414 - RNA, 20 nt, Artificial Sequence
  Sythetic
caggccaaagaauuccugga

SEQ ID NO: 415 - RNA, 20 nt, Artificial Sequence
  Sythetic
gagaaaauaaacaaucauga

SEQ ID NO: 416 - RNA, 20 nt, Artificial Sequence
  Sythetic
cccgacaaaggcauagauga

SEQ ID NO: 417 - RNA, 20 nt, Artificial Sequence
  Sythetic
cagaauugauacugacugua

SEQ ID NO: 418 - RNA, 20 nt, Artificial Sequence
  Sythetic
aggagaaggacaauguugua

SEQ ID NO: 419 - RNA, 20 nt, Artificial Sequence
  Sythetic
auaauugcaguagcucuaac

SEQ ID NO: 420 - RNA, 20 nt, Artificial Sequence
  Sythetic
ucaguuuacacccgauccac

SEQ ID NO: 421 - RNA, 20 nt, Artificial Sequence
  Sythetic
gaaaugagaagaagaggcac

SEQ ID NO: 422 - RNA, 20 nt, Artificial Sequence
  Sythetic
uauucaggccaaagaauucc

SEQ ID NO: 423 - RNA, 20 nt, Artificial Sequence
  Sythetic
gaucugguaaagaugauucc

SEQ ID NO: 424 - RNA, 20 nt, Artificial Sequence
  Sythetic
ccuucuccugaacaccuucc

SEQ ID NO: 425 - RNA, 20 nt, Artificial Sequence
  Sythetic
cacccgauccacuggggagc

SEQ ID NO: 426 - RNA, 20 nt, Artificial Sequence
  Sythetic
ugaccaugacaagcagcggc

SEQ ID NO: 427 - RNA, 20 nt, Artificial Sequence
  Sythetic
aaagauagucaucuuggggc

SEQ ID NO: 428 - RNA, 20 nt, Artificial Sequence
  Sythetic
ugacacggacucaagugggc

SEQ ID NO: 429 - RNA, 20 nt, Artificial Sequence
  Sythetic
cagguuggaccaagcuaugc

SEQ ID NO: 430 - RNA, 20 nt, Artificial Sequence
  Sythetic
guauggaaaaugagagcugc

SEQ ID NO: 431 - RNA, 20 nt, Artificial Sequence
  Sythetic
cucgcucgggagccucuugc

SEQ ID NO: 432 - RNA, 20 nt, Artificial Sequence
  Sythetic
aagaccuucuuuuugagauc

SEQ ID NO: 433 - RNA, 20 nt, Artificial Sequence
  Sythetic
uuccugcuccccaguggauc

SEQ ID NO: 434 - RNA, 20 nt, Artificial Sequence
  Sythetic
gucauggucaucugcuacuc

SEQ ID NO: 435 - RNA, 20 nt, Artificial Sequence
  Sythetic
uaaacugagcuugcucgcuc

SEQ ID NO: 436 - RNA, 20 nt, Artificial Sequence
  Sythetic
agaugacuaucuuuaauguc

SEQ ID NO: 437 - RNA, 20 nt, Artificial Sequence
  Sythetic
ccaucaucuaugccuuuguc

SEQ ID NO: 438 - RNA, 20 nt, Artificial Sequence
  Sythetic
cauacagucaguaucaauuc

SEQ ID NO: 439 - RNA, 20 nt, Artificial Sequence
  Sythetic
uagagcuacugcaauuauuc

SEQ ID NO: 440 - RNA, 20 nt, Artificial Sequence
  Sythetic
ugauuguuuauuuucucuuc

SEQ ID NO: 441 - RNA, 20 nt, Artificial Sequence
  Sythetic
agaauuccuggaagguguuc

SEQ ID NO: 442 - RNA, 20 nt, Artificial Sequence
  Sythetic
cuguucuauuuuccagcaag

SEQ ID NO: 443 - RNA, 20 nt, Artificial Sequence
  Sythetic
gcuugugacacggacucaag

SEQ ID NO: 444 - RNA, 20 nt, Artificial Sequence
  Sythetic
ggugucgaaaugagaagaag

SEQ ID NO: 445 - RNA, 20 nt, Artificial Sequence
  Sythetic
gcuuuuggaagaagacuaag

SEQ ID NO: 446 - RNA, 20 nt, Artificial Sequence
  Sythetic
agauauuuccugcuccccag

SEQ ID NO: 447 - RNA, 20 nt, Artificial Sequence
  Sythetic
cagaugaccaugacaagcag

SEQ ID NO: 448 - RNA, 20 nt, Artificial Sequence
  Sythetic
caucaucuaugccuuugucg

SEQ ID NO: 449 - RNA, 20 nt, Artificial Sequence
  Sythetic
cgacaaaggcauagaugaug

SEQ ID NO: 450 - RNA, 20 nt, Artificial Sequence
  Sythetic
aguuuacacccgauccacug

SEQ ID NO: 451 - RNA, 20 nt, Artificial Sequence
  Sythetic
uggggagcaggaaauaucug

SEQ ID NO: 452 - RNA, 20 nt, Artificial Sequence
  Sythetic
agaagaggcacagggcugug

SEQ ID NO: 453 - RNA, 20 nt, Artificial Sequence
  Sythetic
cauuaaagauagucaucuug

SEQ ID NO: 454 - RNA, 20 nt, Artificial Sequence
  Sythetic
uuuccugcuccccaguggau

SEQ ID NO: 455 - RNA, 20 nt, Artificial Sequence
  Sythetic
ccgacaaaggcauagaugau

SEQ ID NO: 456 - RNA, 20 nt, Artificial Sequence
  Sythetic
caguuuacacccgauccacu

SEQ ID NO: 457 - RNA, 20 nt, Artificial Sequence
  Sythetic
ugucauggucaucugcuacu

SEQ ID NO: 458 - RNA, 20 nt, Artificial Sequence
  Sythetic
aucugguaaagaugauuccu

SEQ ID NO: 459 - RNA, 20 nt, Artificial Sequence
  Sythetic
ucucugucaccugcauagcu

SEQ ID NO: 460 - RNA, 20 nt, Artificial Sequence
  Sythetic
guaaacugagcuugcucgcu

SEQ ID NO: 461 - RNA, 20 nt, Artificial Sequence
  Sythetic
gacauuaaagauagucaucu

SEQ ID NO: 462 - RNA, 20 nt, Artificial Sequence
  Sythetic
augcaggugacagagacucu

SEQ ID NO: 463 - RNA, 20 nt, Artificial Sequence
  Sythetic
gauuguuuauuuucucuucu

SEQ ID NO: 464 - RNA, 20 nt, Artificial Sequence
  Sythetic
cuugugacacggacucaagu

SEQ ID NO: 465 - RNA, 20 nt, Artificial Sequence
  Sythetic
uugcaguagcucuaacaggu

SEQ ID NO: 466 - RNA, 20 nt, Artificial Sequence
  Sythetic
ggggagcaggaaauaucugu

SEQ ID NO: 467 - RNA, 20 nt, Artificial Sequence
  Sythetic
caggagaaggacaauguugu

SEQ ID NO: 468 - RNA, 20 nt, Artificial Sequence
  Sythetic
cccaucaucuaugccuuugu

SEQ ID NO: 469 - RNA, 20 nt, Artificial Sequence
  Sythetic
gaauccuaaaaacucugcuu

SEQ ID NO: 470 - RNA, 20 nt, Artificial Sequence
  Sythetic
acauuaaagauagucaucuu

SEQ ID NO: 471 - RNA, 20 nt, Artificial Sequence
  Sythetic
ugcaggugacagagacucuu

SEQ ID NO: 472 - RNA, 20 nt, Artificial Sequence
  Sythetic
aacaccuuccaggaauucuu

SEQ ID NO: 473 - RNA, 20 nt, Artificial Sequence
  Sythetic
acagcauuugcagaagcguu

SEQ ID NO: 474 - RNA, 20 nt, Artificial Sequence
  Sythetic
agcguuuggcaaugugcuuu

SEQ ID NO: 475 - RNA, 20 nt, Artificial Sequence
  Sythetic
gacaccgaagcagaguuuuu

SEQ ID NO: 476 - RNA, 18 nt, Artificial Sequence
  Sythetic
auaaaauagagcccuguc

SEQ ID NO: 477 - RNA, 19 nt, Artificial Sequence
  Sythetic
uauaaaauagagcccuguc

SEQ ID NO: 478 - RNA, 20 nt, Artificial Sequence
  Sythetic
cuauaaaauagagcccuguc

SEQ ID NO: 479 - RNA, 21 nt, Artificial Sequence
  Sythetic
ccuauaaaauagagcccuguc

SEQ ID NO: 480 - RNA, 22 nt, Artificial Sequence
  Sythetic
gccuauaaaauagagcccuguc

SEQ ID NO: 481 - RNA, 23 nt, Artificial Sequence
  Sythetic
agccuauaaaauagagcccuguc

SEQ ID NO: 482 - RNA, 24 nt, Artificial Sequence
  Sythetic
aagccuauaaaauagagcccuguc

SEQ ID NO: 483 - RNA, 18 nt, Artificial Sequence
  Sythetic
uuugcaguuuaucaggau

SEQ ID NO: 484 - RNA, 19 nt, Artificial Sequence
  Sythetic
uuuugcaguuuaucaggau

SEQ ID NO: 485 - RNA, 20 nt, Artificial Sequence
  Sythetic
cuuuugcaguuuaucaggau

SEQ ID NO: 486 - RNA, 18 nt, Artificial Sequence
  Sythetic
ggugacaagugugaucac

SEQ ID NO: 487 - RNA, 19 nt, Artificial Sequence
  Sythetic
uggugacaagugugaucac

SEQ ID NO: 488 - RNA, 20 nt, Artificial Sequence
  Sythetic
guggugacaagugugaucac

SEQ ID NO: 489 - RNA, 21 nt, Artificial Sequence
  Sythetic
gguggugacaagugugaucac

SEQ ID NO: 490 - RNA, 22 nt, Artificial Sequence
  Sythetic
ggguggugacaagugugaucac

SEQ ID NO: 491 - RNA, 23 nt, Artificial Sequence
  Sythetic
gggguggugacaagugugaucac

SEQ ID NO: 492 - RNA, 24 nt, Artificial Sequence
  Sythetic
ugggguggugacaagugugaucac

SEQ ID NO: 493 - RNA, 21 nt, Artificial Sequence
  Sythetic
uuaugcacaggguggaacaag

SEQ ID NO: 494 - RNA, 22 nt, Artificial Sequence
  Sythetic
uuuaugcacaggguggaacaag

SEQ ID NO: 495 - RNA, 23 nt, Artificial Sequence
  Sythetic
auuuaugcacaggguggaacaag

SEQ ID NO: 496 - RNA, 24 nt, Artificial Sequence
  Sythetic
uauuuaugcacaggguggaacaag

SEQ ID NO: 497 - RNA, 18 nt, Artificial Sequence
  Sythetic
aaccaaagaugaacacca

SEQ ID NO: 498 - RNA, 19 nt, Artificial Sequence
  Sythetic
aaaccaaagaugaacacca

SEQ ID NO: 499 - RNA, 20 nt, Artificial Sequence
  Sythetic
aaaaccaaagaugaacacca

SEQ ID NO: 500 - RNA, 21 nt, Artificial Sequence
  Sythetic
caaaaccaaagaugaacacca

SEQ ID NO: 501 - RNA, 22 nt, Artificial Sequence
  Sythetic
acaaaaccaaagaugaacacca

SEQ ID NO: 502 - RNA, 23 nt, Artificial Sequence
  Sythetic
cacaaaaccaaagaugaacacca

SEQ ID NO: 503 - RNA, 24 nt, Artificial Sequence
  Sythetic
ccacaaaaccaaagaugaacacca

SEQ ID NO: 504 - RNA, 18 nt, Artificial Sequence
  Sythetic
guaccuaucgauugucag

SEQ ID NO: 505 - RNA, 19 nt, Artificial Sequence
  Sythetic
gguaccuaucgauugucag

SEQ ID NO: 506 - RNA, 20 nt, Artificial Sequence
  Sythetic
agguaccuaucgauugucag

SEQ ID NO: 507 - RNA, 21 nt, Artificial Sequence
  Sythetic
cagguaccuaucgauugucag

SEQ ID NO: 508 - RNA, 22 nt, Artificial Sequence
  Sythetic
ccagguaccuaucgauugucag

SEQ ID NO: 509 - RNA, 23 nt, Artificial Sequence
  Sythetic
gccagguaccuaucgauugucag

SEQ ID NO: 510 - RNA, 24 nt, Artificial Sequence
  Sythetic
agccagguaccuaucgauugucag

SEQ ID NO: 511 - RNA, 21 nt, Artificial Sequence
  Sythetic
ccuuuugcaguuuaucaggau

SEQ ID NO: 512 - RNA, 22 nt, Artificial Sequence
  Sythetic
gccuuuugcaguuuaucaggau

SEQ ID NO: 513 - RNA, 23 nt, Artificial Sequence
  Sythetic
agccuuuugcaguuuaucaggau

SEQ ID NO: 514 - RNA, 24 nt, Artificial Sequence
  Sythetic
cagccuuuugcaguuuaucaggau

SEQ ID NO: 515 - RNA, 18 nt, Artificial Sequence
  Sythetic
cagccuuuugcaguuuau

SEQ ID NO: 516 - RNA, 19 nt, Artificial Sequence
  Sythetic
ucagccuuuugcaguuuau

SEQ ID NO: 517 - RNA, 20 nt, Artificial Sequence
  Sythetic
uucagccuuuugcaguuuau

SEQ ID NO: 518 - RNA, 21 nt, Artificial Sequence
  Sythetic
cuucagccuuuugcaguuuau

SEQ ID NO: 519 - RNA, 22 nt, Artificial Sequence
  Sythetic
ucuucagccuuuugcaguuuau

SEQ ID NO: 520 - RNA, 23 nt, Artificial Sequence
  Sythetic
cucuucagccuuuugcaguuuau

SEQ ID NO: 521 - RNA, 24 nt, Artificial Sequence
  Sythetic
gcucuucagccuuuugcaguuuau

SEQ ID NO: 522 - RNA, 18 nt, Artificial Sequence
  Sythetic
uguguuugcgucucuccc

SEQ ID NO: 523 - RNA, 19 nt, Artificial Sequence
  Sythetic
cuguguuugcgucucuccc

SEQ ID NO: 524 - RNA, 20 nt, Artificial Sequence
  Sythetic
gcuguguuugcgucucuccc

SEQ ID NO: 525 - RNA, 21 nt, Artificial Sequence
  Sythetic
ggcuguguuugcgucucuccc

SEQ ID NO: 526 - RNA, 22 nt, Artificial Sequence
  Sythetic
uggcuguguuugcgucucuccc

SEQ ID NO: 527 - RNA, 23 nt, Artificial Sequence
  Sythetic
guggcuguguuugcgucucuccc

SEQ ID NO: 528 - RNA, 24 nt, Artificial Sequence
  Sythetic
gguggcuguguuugcgucucuccc

SEQ ID NO: 529 - RNA, 18 nt, Artificial Sequence
  Sythetic
uuuuauaggcuucuucuc

SEQ ID NO: 530 - RNA, 19 nt, Artificial Sequence
  Sythetic
auuuuauaggcuucuucuc

SEQ ID NO: 531 - RNA, 20 nt, Artificial Sequence
  Sythetic
uauuuuauaggcuucuucuc

SEQ ID NO: 532 - RNA, 21 nt, Artificial Sequence
  Sythetic
cuauuuuauaggcuucuucuc

SEQ ID NO: 533 - RNA, 22 nt, Artificial Sequence
  Sythetic
ucuauuuuauaggcuucuucuc

SEQ ID NO: 534 - RNA, 23 nt, Artificial Sequence
  Sythetic
cucuauuuuauaggcuucuucuc

SEQ ID NO: 535 - RNA, 24 nt, Artificial Sequence
  Sythetic
gcucuauuuuauaggcuucuucuc

SEQ ID NO: 536 - RNA, 18 nt, Artificial Sequence
  Sythetic
ugcacaggguggaacaag

SEQ ID NO: 537 - RNA, 19 nt, Artificial Sequence
  Sythetic
augcacaggguggaacaag

SEQ ID NO: 538 - RNA, 20 nt, Artificial Sequence
  Sythetic
uaugcacaggguggaacaag

SEQ ID NO: 539 - RNA, 18 nt, Artificial Sequence
  Sythetic
agccaggacggucaccuu

SEQ ID NO: 540 - RNA, 19 nt, Artificial Sequence
  Sythetic
aagccaggacggucaccuu

SEQ ID NO: 541 - RNA, 20 nt, Artificial Sequence
  Sythetic
aaagccaggacggucaccuu

SEQ ID NO: 542 - RNA, 21 nt, Artificial Sequence
  Sythetic
aaaagccaggacggucaccuu

SEQ ID NO: 543 - RNA, 22 nt, Artificial Sequence
  Sythetic
uaaaagccaggacggucaccuu

SEQ ID NO: 544 - RNA, 23 nt, Artificial Sequence
  Sythetic
uuaaaagccaggacggucaccuu

SEQ ID NO: 545 - RNA, 24 nt, Artificial Sequence
  Sythetic
uuuaaaagccaggacggucaccuu

SEQ ID NO: 546 - RNA, 18 nt, Artificial Sequence
  Sythetic
gagaagaagccuauaaaa

SEQ ID NO: 547 - RNA, 19 nt, Artificial Sequence
  Sythetic
agagaagaagccuauaaaa

SEQ ID NO: 548 - RNA, 20 nt, Artificial Sequence
  Sythetic
cagagaagaagccuauaaaa

SEQ ID NO: 549 - RNA, 21 nt, Artificial Sequence
  Sythetic
ccagagaagaagccuauaaaa

SEQ ID NO: 550 - RNA, 22 nt, Artificial Sequence
  Sythetic
uccagagaagaagccuauaaaa

SEQ ID NO: 551 - RNA, 23 nt, Artificial Sequence
  Sythetic
uuccagagaagaagccuauaaaa

SEQ ID NO: 552 - RNA, 24 nt, Artificial Sequence
  Sythetic
auuccagagaagaagccuauaaaa

SEQ ID NO: 553 - RNA, 18 nt, Artificial Sequence
  Sythetic
agcauagugagcccagaa

SEQ ID NO: 554 - RNA, 19 nt, Artificial Sequence
  Sythetic
cagcauagugagcccagaa

SEQ ID NO: 555 - RNA, 20 nt, Artificial Sequence
  Sythetic
gcagcauagugagcccagaa

SEQ ID NO: 556 - RNA, 21 nt, Artificial Sequence
  Sythetic
ggcagcauagugagcccagaa

SEQ ID NO: 557 - RNA, 22 nt, Artificial Sequence
  Sythetic
cggcagcauagugagcccagaa

SEQ ID NO: 558 - RNA, 23 nt, Artificial Sequence
  Sythetic
gcggcagcauagugagcccagaa

SEQ ID NO: 559 - RNA, 24 nt, Artificial Sequence
  Sythetic
ggcggcagcauagugagcccagaa

SEQ ID NO: 560 - RNA, 18 nt, Artificial Sequence
  Sythetic
uguauuuccaaaguccca

SEQ ID NO: 561 - RNA, 19 nt, Artificial Sequence
  Sythetic
uuguauuuccaaaguccca

SEQ ID NO: 562 - RNA, 20 nt, Artificial Sequence
  Sythetic
auuguauuuccaaaguccca

SEQ ID NO: 563 - RNA, 21 nt, Artificial Sequence
  Sythetic
cauuguauuuccaaaguccca

SEQ ID NO: 564 - RNA, 22 nt, Artificial Sequence
  Sythetic
acauuguauuuccaaaguccca

SEQ ID NO: 565 - RNA, 23 nt, Artificial Sequence
  Sythetic
cacauuguauuuccaaaguccca

SEQ ID NO: 566 - RNA, 24 nt, Artificial Sequence
  Sythetic
acacauuguauuuccaaaguccca

SEQ ID NO: 567 - RNA, 18 nt, Artificial Sequence
  Sythetic
augaugaagaagauucca

SEQ ID NO: 568 - RNA, 19 nt, Artificial Sequence
  Sythetic
gaugaugaagaagauucca

SEQ ID NO: 569 - RNA, 20 nt, Artificial Sequence
  Sythetic
ggaugaugaagaagauucca

SEQ ID NO: 570 - RNA, 21 nt, Artificial Sequence
  Sythetic
aggaugaugaagaagauucca

SEQ ID NO: 571 - RNA, 22 nt, Artificial Sequence
  Sythetic
gaggaugaugaagaagauucca

SEQ ID NO: 572 - RNA, 23 nt, Artificial Sequence
  Sythetic
ggaggaugaugaagaagauucca

SEQ ID NO: 573 - RNA, 24 nt, Artificial Sequence
  Sythetic
aggaggaugaugaagaagauucca

SEQ ID NO: 574 - RNA, 18 nt, Artificial Sequence
  Sythetic
cagaaggggacaguaaga

SEQ ID NO: 575 - RNA, 19 nt, Artificial Sequence
  Sythetic
ccagaaggggacaguaaga

SEQ ID NO: 576 - RNA, 20 nt, Artificial Sequence
  Sythetic
cccagaaggggacaguaaga

SEQ ID NO: 577 - RNA, 21 nt, Artificial Sequence
  Sythetic
gcccagaaggggacaguaaga

SEQ ID NO: 578 - RNA, 22 nt, Artificial Sequence
  Sythetic
agcccagaaggggacaguaaga

SEQ ID NO: 579 - RNA, 23 nt, Artificial Sequence
  Sythetic
gagcccagaaggggacaguaaga

SEQ ID NO: 580 - RNA, 24 nt, Artificial Sequence
  Sythetic
ugagcccagaaggggacaguaaga

SEQ ID NO: 581 - RNA, 18 nt, Artificial Sequence
  Sythetic
cagcauagugagcccaga

SEQ ID NO: 582 - RNA, 19 nt, Artificial Sequence
  Sythetic
gcagcauagugagcccaga

SEQ ID NO: 583 - RNA, 20 nt, Artificial Sequence
  Sythetic
ggcagcauagugagcccaga

SEQ ID NO: 584 - RNA, 21 nt, Artificial Sequence
  Sythetic
cggcagcauagugagcccaga

SEQ ID NO: 585 - RNA, 22 nt, Artificial Sequence
  Sythetic
gcggcagcauagugagcccaga

SEQ ID NO: 586 - RNA, 23 nt, Artificial Sequence
  Sythetic
ggcggcagcauagugagcccaga

SEQ ID NO: 587 - RNA, 24 nt, Artificial Sequence
  Sythetic
gggcggcagcauagugagcccaga

SEQ ID NO: 588 - RNA, 18 nt, Artificial Sequence
  Sythetic
aauaauugaugucauaga

SEQ ID NO: 589 - RNA, 19 nt, Artificial Sequence
  Sythetic
uaauaauugaugucauaga

SEQ ID NO: 590 - RNA, 20 nt, Artificial Sequence
  Sythetic
auaauaauugaugucauaga

SEQ ID NO: 591 - RNA, 21 nt, Artificial Sequence
  Sythetic
uauaauaauugaugucauaga

SEQ ID NO: 592 - RNA, 22 nt, Artificial Sequence
  Sythetic
guauaauaauugaugucauaga

SEQ ID NO: 593 - RNA, 23 nt, Artificial Sequence
  Sythetic
uguauaauaauugaugucauaga

SEQ ID NO: 594 - RNA, 24 nt, Artificial Sequence
  Sythetic
auguauaauaauugaugucauaga

SEQ ID NO: 595 - RNA, 18 nt, Artificial Sequence
  Sythetic
ugaacaccagugaguaga

SEQ ID NO: 596 - RNA, 19 nt, Artificial Sequence
  Sythetic
augaacaccagugaguaga

SEQ ID NO: 597 - RNA, 20 nt, Artificial Sequence
  Sythetic
gaugaacaccagugaguaga

SEQ ID NO: 598 - RNA, 21 nt, Artificial Sequence
  Sythetic
agaugaacaccagugaguaga

SEQ ID NO: 599 - RNA, 22 nt, Artificial Sequence
  Sythetic
aagaugaacaccagugaguaga

SEQ ID NO: 600 - RNA, 23 nt, Artificial Sequence
  Sythetic
aaagaugaacaccagugaguaga

SEQ ID NO: 601 - RNA, 24 nt, Artificial Sequence
  Sythetic
caaagaugaacaccagugaguaga

SEQ ID NO: 602 - RNA, 18 nt, Artificial Sequence
  Sythetic
ccacugggcggcagcaua

SEQ ID NO: 603 - RNA, 19 nt, Artificial Sequence
  Sythetic
cccacugggcggcagcaua

SEQ ID NO: 604 - RNA, 20 nt, Artificial Sequence
  Sythetic
ucccacugggcggcagcaua

SEQ ID NO: 605 - RNA, 21 nt, Artificial Sequence
  Sythetic
gucccacugggcggcagcaua

SEQ ID NO: 606 - RNA, 22 nt, Artificial Sequence
  Sythetic
agucccacugggcggcagcaua

SEQ ID NO: 607 - RNA, 23 nt, Artificial Sequence
  Sythetic
aagucccacugggcggcagcaua

SEQ ID NO: 608 - RNA, 24 nt, Artificial Sequence
  Sythetic
aaagucccacugggcggcagcaua

SEQ ID NO: 609 - RNA, 18 nt, Artificial Sequence
  Sythetic
gcggcagcauagugagcc

SEQ ID NO: 610 - RNA, 19 nt, Artificial Sequence
  Sythetic
ggcggcagcauagugagcc

SEQ ID NO: 611 - RNA, 20 nt, Artificial Sequence
  Sythetic
gggcggcagcauagugagcc

SEQ ID NO: 612 - RNA, 21 nt, Artificial Sequence
  Sythetic
ugggcggcagcauagugagcc

SEQ ID NO: 613 - RNA, 22 nt, Artificial Sequence
  Sythetic
cugggcggcagcauagugagcc

SEQ ID NO: 614 - RNA, 23 nt, Artificial Sequence
  Sythetic
acugggcggcagcauagugagcc

SEQ ID NO: 615 - RNA, 24 nt, Artificial Sequence
  Sythetic
cacugggcggcagcauagugagcc

SEQ ID NO: 616 - RNA, 18 nt, Artificial Sequence
  Sythetic
ucugguaaagaugauucc

SEQ ID NO: 617 - RNA, 19 nt, Artificial Sequence
  Sythetic
aucugguaaagaugauucc

SEQ ID NO: 618 - RNA, 20 nt, Artificial Sequence
  Sythetic
gaucugguaaagaugauucc

SEQ ID NO: 619 - RNA, 21 nt, Artificial Sequence
  Sythetic
agaucugguaaagaugauucc

SEQ ID NO: 620 - RNA, 22 nt, Artificial Sequence
  Sythetic
gagaucugguaaagaugauucc

SEQ ID NO: 621 - RNA, 23 nt, Artificial Sequence
  Sythetic
ugagaucugguaaagaugauucc

SEQ ID NO: 622 - RNA, 24 nt, Artificial Sequence
  Sythetic
uugagaucugguaaagaugauucc

SEQ ID NO: 623 - RNA, 18 nt, Artificial Sequence
  Sythetic
uuuuaaagcaaacacagc

SEQ ID NO: 624 - RNA, 19 nt, Artificial Sequence
  Sythetic
cuuuuaaagcaaacacagc

SEQ ID NO: 625 - RNA, 20 nt, Artificial Sequence
  Sythetic
gcuuuuaaagcaaacacagc

SEQ ID NO: 626 - RNA, 21 nt, Artificial Sequence
  Sythetic
ggcuuuuaaagcaaacacagc

SEQ ID NO: 627 - RNA, 22 nt, Artificial Sequence
  Sythetic
uggcuuuuaaagcaaacacagc

SEQ ID NO: 628 - RNA, 23 nt, Artificial Sequence
  Sythetic
cuggcuuuuaaagcaaacacagc

SEQ ID NO: 629 - RNA, 24 nt, Artificial Sequence
  Sythetic
ccuggcuuuuaaagcaaacacagc

SEQ ID NO: 630 - RNA, 18 nt, Artificial Sequence
  Sythetic
agugaguagagcggaggc

SEQ ID NO: 631 - RNA, 19 nt, Artificial Sequence
  Sythetic
cagugaguagagcggaggc

SEQ ID NO: 632 - RNA, 20 nt, Artificial Sequence
  Sythetic
ccagugaguagagcggaggc

SEQ ID NO: 633 - RNA, 21 nt, Artificial Sequence
  Sythetic
accagugaguagagcggaggc

SEQ ID NO: 634 - RNA, 22 nt, Artificial Sequence
  Sythetic
caccagugaguagagcggaggc

SEQ ID NO: 635 - RNA, 23 nt, Artificial Sequence
  Sythetic
acaccagugaguagagcggaggc

SEQ ID NO: 636 - RNA, 24 nt, Artificial Sequence
  Sythetic
aacaccagugaguagagcggaggc

SEQ ID NO: 637 - RNA, 18 nt, Artificial Sequence
  Sythetic
agguaccuaucgauuguc

SEQ ID NO: 638 - RNA, 19 nt, Artificial Sequence
  Sythetic
cagguaccuaucgauuguc

SEQ ID NO: 639 - RNA, 20 nt, Artificial Sequence
  Sythetic
ccagguaccuaucgauuguc

SEQ ID NO: 640 - RNA, 21 nt, Artificial Sequence
  Sythetic
gccagguaccuaucgauuguc

SEQ ID NO: 641 - RNA, 22 nt, Artificial Sequence
  Sythetic
agccagguaccuaucgauuguc

SEQ ID NO: 642 - RNA, 23 nt, Artificial Sequence
  Sythetic
cagccagguaccuaucgauuguc

SEQ ID NO: 643 - RNA, 24 nt, Artificial Sequence
  Sythetic
acagccagguaccuaucgauuguc

SEQ ID NO: 644 - RNA, 18 nt, Artificial Sequence
  Sythetic
ggaugaugaagaagauuc

SEQ ID NO: 645 - RNA, 19 nt, Artificial Sequence
  Sythetic
aggaugaugaagaagauuc

SEQ ID NO: 646 - RNA, 20 nt, Artificial Sequence
  Sythetic
gaggaugaugaagaagauuc

SEQ ID NO: 647 - RNA, 21 nt, Artificial Sequence
  Sythetic
ggaggaugaugaagaagauuc

SEQ ID NO: 648 - RNA, 22 nt, Artificial Sequence
  Sythetic
aggaggaugaugaagaagauuc

SEQ ID NO: 649 - RNA, 23 nt, Artificial Sequence
  Sythetic
caggaggaugaugaagaagauuc

SEQ ID NO: 650 - RNA, 24 nt, Artificial Sequence
  Sythetic
ucaggaggaugaugaagaagauuc

SEQ ID NO: 651 - RNA, 18 nt, Artificial Sequence
  Sythetic
aucugguaaagaugauuc

SEQ ID NO: 652 - RNA, 19 nt, Artificial Sequence
  Sythetic
gaucugguaaagaugauuc

SEQ ID NO: 653 - RNA, 20 nt, Artificial Sequence
  Sythetic
agaucugguaaagaugauuc

SEQ ID NO: 654 - RNA, 21 nt, Artificial Sequence
  Sythetic
gagaucugguaaagaugauuc

SEQ ID NO: 655 - RNA, 22 nt, Artificial Sequence
  Sythetic
ugagaucugguaaagaugauuc

SEQ ID NO: 656 - RNA, 23 nt, Artificial Sequence
  Sythetic
uugagaucugguaaagaugauuc

SEQ ID NO: 657 - RNA, 24 nt, Artificial Sequence
  Sythetic
uuugagaucugguaaagaugauuc

SEQ ID NO: 658 - RNA, 18 nt, Artificial Sequence
  Sythetic
uugcccacaaaaccaaag

SEQ ID NO: 659 - RNA, 19 nt, Artificial Sequence
  Sythetic
guugcccacaaaaccaaag

SEQ ID NO: 660 - RNA, 20 nt, Artificial Sequence
  Sythetic
uguugcccacaaaaccaaag

SEQ ID NO: 661 - RNA, 21 nt, Artificial Sequence
  Sythetic
auguugcccacaaaaccaaag

SEQ ID NO: 662 - RNA, 22 nt, Artificial Sequence
  Sythetic
cauguugcccacaaaaccaaag

SEQ ID NO: 663 - RNA, 23 nt, Artificial Sequence
  Sythetic
gcauguugcccacaaaaccaaag

SEQ ID NO: 664 - RNA, 24 nt, Artificial Sequence
  Sythetic
agcauguugcccacaaaaccaaag

SEQ ID NO: 665 - RNA, 18 nt, Artificial Sequence
  Sythetic
ccagaaggggacaguaag

SEQ ID NO: 666 - RNA, 19 nt, Artificial Sequence
  Sythetic
cccagaaggggacaguaag

SEQ ID NO: 667 - RNA, 20 nt, Artificial Sequence
  Sythetic
gcccagaaggggacaguaag

SEQ ID NO: 668 - RNA, 21 nt, Artificial Sequence
  Sythetic
agcccagaaggggacaguaag

SEQ ID NO: 669 - RNA, 22 nt, Artificial Sequence
  Sythetic
gagcccagaaggggacaguaag

SEQ ID NO: 670 - RNA, 23 nt, Artificial Sequence
  Sythetic
ugagcccagaaggggacaguaag

SEQ ID NO: 671 - RNA, 24 nt, Artificial Sequence
  Sythetic
gugagcccagaaggggacaguaag

SEQ ID NO: 672 - RNA, 18 nt, Artificial Sequence
  Sythetic
gcagcauagugagcccag

SEQ ID NO: 673 - RNA, 19 nt, Artificial Sequence
  Sythetic
ggcagcauagugagcccag

SEQ ID NO: 674 - RNA, 20 nt, Artificial Sequence
  Sythetic
cggcagcauagugagcccag

SEQ ID NO: 675 - RNA, 21 nt, Artificial Sequence
  Sythetic
gcggcagcauagugagcccag

SEQ ID NO: 676 - RNA, 22 nt, Artificial Sequence
  Sythetic
ggcggcagcauagugagcccag

SEQ ID NO: 677 - RNA, 23 nt, Artificial Sequence
  Sythetic
gggcggcagcauagugagcccag

SEQ ID NO: 678 - RNA, 24 nt, Artificial Sequence
  Sythetic
ugggcggcagcauagugagcccag

SEQ ID NO: 679 - RNA, 18 nt, Artificial Sequence
  Sythetic
augaagaagauuccagag

SEQ ID NO: 680 - RNA, 19 nt, Artificial Sequence
  Sythetic
gaugaagaagauuccagag

SEQ ID NO: 681 - RNA, 20 nt, Artificial Sequence
  Sythetic
ugaugaagaagauuccagag

SEQ ID NO: 682 - RNA, 21 nt, Artificial Sequence
  Sythetic
augaugaagaagauuccagag

SEQ ID NO: 683 - RNA, 22 nt, Artificial Sequence
  Sythetic
gaugaugaagaagauuccagag

SEQ ID NO: 684 - RNA, 23 nt, Artificial Sequence
  Sythetic
ggaugaugaagaagauuccagag

SEQ ID NO: 685 - RNA, 24 nt, Artificial Sequence
  Sythetic
aggaugaugaagaagauuccagag

SEQ ID NO: 686 - RNA, 18 nt, Artificial Sequence
  Sythetic
gaacaccagugaguagag

SEQ ID NO: 687 - RNA, 19 nt, Artificial Sequence
  Sythetic
ugaacaccagugaguagag

SEQ ID NO: 688 - RNA, 20 nt, Artificial Sequence
  Sythetic
augaacaccagugaguagag

SEQ ID NO: 689 - RNA, 21 nt, Artificial Sequence
  Sythetic
gaugaacaccagugaguagag

SEQ ID NO: 690 - RNA, 22 nt, Artificial Sequence
  Sythetic
agaugaacaccagugaguagag

SEQ ID NO: 691 - RNA, 23 nt, Artificial Sequence
  Sythetic
aagaugaacaccagugaguagag

SEQ ID NO: 692 - RNA, 24 nt, Artificial Sequence
  Sythetic
aaagaugaacaccagugaguagag

SEQ ID NO: 693 - RNA, 18 nt, Artificial Sequence
  Sythetic
guagagcggaggcaggag

SEQ ID NO: 694 - RNA, 19 nt, Artificial Sequence
  Sythetic
aguagagcggaggcaggag

SEQ ID NO: 695 - RNA, 20 nt, Artificial Sequence
  Sythetic
gaguagagcggaggcaggag

SEQ ID NO: 696 - RNA, 21 nt, Artificial Sequence
  Sythetic
ugaguagagcggaggcaggag

SEQ ID NO: 697 - RNA, 22 nt, Artificial Sequence
  Sythetic
gugaguagagcggaggcaggag

SEQ ID NO: 698 - RNA, 23 nt, Artificial Sequence
  Sythetic
agugaguagagcggaggcaggag

SEQ ID NO: 699 - RNA, 24 nt, Artificial Sequence
  Sythetic
cagugaguagagcggaggcaggag

SEQ ID NO: 700 - RNA, 18 nt, Artificial Sequence
  Sythetic
aagaugaacaccagugag

SEQ ID NO: 701 - RNA, 19 nt, Artificial Sequence
  Sythetic
aaagaugaacaccagugag

SEQ ID NO: 702 - RNA, 20 nt, Artificial Sequence
  Sythetic
caaagaugaacaccagugag

SEQ ID NO: 703 - RNA, 21 nt, Artificial Sequence
  Sythetic
ccaaagaugaacaccagugag

SEQ ID NO: 704 - RNA, 22 nt, Artificial Sequence
  Sythetic
accaaagaugaacaccagugag

SEQ ID NO: 705 - RNA, 23 nt, Artificial Sequence
  Sythetic
aaccaaagaugaacaccagugag

SEQ ID NO: 706 - RNA, 24 nt, Artificial Sequence
  Sythetic
aaaccaaagaugaacaccagugag

SEQ ID NO: 707 - RNA, 18 nt, Artificial Sequence
  Sythetic
aggucagagauggccagg

SEQ ID NO: 708 - RNA, 19 nt, Artificial Sequence
  Sythetic
caggucagagauggccagg

SEQ ID NO: 709 - RNA, 20 nt, Artificial Sequence
  Sythetic
acaggucagagauggccagg

SEQ ID NO: 710 - RNA, 21 nt, Artificial Sequence
  Sythetic
aacaggucagagauggccagg

SEQ ID NO: 711 - RNA, 22 nt, Artificial Sequence
  Sythetic
aaacaggucagagauggccagg

SEQ ID NO: 712 - RNA, 23 nt, Artificial Sequence
  Sythetic
aaaacaggucagagauggccagg

SEQ ID NO: 713 - RNA, 24 nt, Artificial Sequence
  Sythetic
aaaaacaggucagagauggccagg

SEQ ID NO: 714 - RNA, 18 nt, Artificial Sequence
  Sythetic
cuuuugcaguuuaucagg

SEQ ID NO: 715 - RNA, 19 nt, Artificial Sequence
  Sythetic
ccuuuugcaguuuaucagg

SEQ ID NO: 716 - RNA, 20 nt, Artificial Sequence
  Sythetic
gccuuuugcaguuuaucagg

SEQ ID NO: 717 - RNA, 21 nt, Artificial Sequence
  Sythetic
agccuuuugcaguuuaucagg

SEQ ID NO: 718 - RNA, 22 nt, Artificial Sequence
  Sythetic
cagccuuuugcaguuuaucagg

SEQ ID NO: 719 - RNA, 23 nt, Artificial Sequence
  Sythetic
ucagccuuuugcaguuuaucagg

SEQ ID NO: 720 - RNA, 24 nt, Artificial Sequence
  Sythetic
uucagccuuuugcaguuuaucagg

SEQ ID NO: 721 - RNA, 18 nt, Artificial Sequence
  Sythetic
cagugaguagagcggagg

SEQ ID NO: 722 - RNA, 19 nt, Artificial Sequence
  Sythetic
ccagugaguagagcggagg

SEQ ID NO: 723 - RNA, 20 nt, Artificial Sequence
  Sythetic
accagugaguagagcggagg

SEQ ID NO: 724 - RNA, 21 nt, Artificial Sequence
  Sythetic
caccagugaguagagcggagg

SEQ ID NO: 725 - RNA, 22 nt, Artificial Sequence
  Sythetic
acaccagugaguagagcggagg

SEQ ID NO: 726 - RNA, 23 nt, Artificial Sequence
  Sythetic
aacaccagugaguagagcggagg

SEQ ID NO: 727 - RNA, 24 nt, Artificial Sequence
  Sythetic
gaacaccagugaguagagcggagg

SEQ ID NO: 728 - RNA, 18 nt, Artificial Sequence
  Sythetic
gguaaagaugauuccugg

SEQ ID NO: 729 - RNA, 19 nt, Artificial Sequence
  Sythetic
ugguaaagaugauuccugg

SEQ ID NO: 730 - RNA, 20 nt, Artificial Sequence
  Sythetic
cugguaaagaugauuccugg

SEQ ID NO: 731 - RNA, 21 nt, Artificial Sequence
  Sythetic
ucugguaaagaugauuccugg

SEQ ID NO: 732 - RNA, 22 nt, Artificial Sequence
  Sythetic
aucugguaaagaugauuccugg

SEQ ID NO: 733 - RNA, 23 nt, Artificial Sequence
  Sythetic
gaucugguaaagaugauuccugg

SEQ ID NO: 734 - RNA, 24 nt, Artificial Sequence
  Sythetic
agaucugguaaagaugauuccugg

SEQ ID NO: 735 - RNA, 18 nt, Artificial Sequence
  Sythetic
uucacauugauuuuuugg

SEQ ID NO: 736 - RNA, 19 nt, Artificial Sequence
  Sythetic
cuucacauugauuuuuugg

SEQ ID NO: 737 - RNA, 20 nt, Artificial Sequence
  Sythetic
gcuucacauugauuuuuugg

SEQ ID NO: 738 - RNA, 21 nt, Artificial Sequence
  Sythetic
ugcuucacauugauuuuuugg

SEQ ID NO: 739 - RNA, 22 nt, Artificial Sequence
  Sythetic
uugcuucacauugauuuuuugg

SEQ ID NO: 740 - RNA, 23 nt, Artificial Sequence
  Sythetic
uuugcuucacauugauuuuuugg

SEQ ID NO: 741 - RNA, 24 nt, Artificial Sequence
  Sythetic
auuugcuucacauugauuuuuugg

SEQ ID NO: 742 - RNA, 18 nt, Artificial Sequence
  Sythetic
ucgauugucaggaggaug

SEQ ID NO: 743 - RNA, 19 nt, Artificial Sequence
  Sythetic
aucgauugucaggaggaug

SEQ ID NO: 744 - RNA, 20 nt, Artificial Sequence
  Sythetic
uaucgauugucaggaggaug

SEQ ID NO: 745 - RNA, 21 nt, Artificial Sequence
  Sythetic
cuaucgauugucaggaggaug

SEQ ID NO: 746 - RNA, 22 nt, Artificial Sequence
  Sythetic
ccuaucgauugucaggaggaug

SEQ ID NO: 747 - RNA, 23 nt, Artificial Sequence
  Sythetic
accuaucgauugucaggaggaug

SEQ ID NO: 748 - RNA, 24 nt, Artificial Sequence
  Sythetic
uaccuaucgauugucaggaggaug

SEQ ID NO: 749 - RNA, 18 nt, Artificial Sequence
  Sythetic
auugucaggaggaugaug

SEQ ID NO: 750 - RNA, 19 nt, Artificial Sequence
  Sythetic
gauugucaggaggaugaug

SEQ ID NO: 751 - RNA, 20 nt, Artificial Sequence
  Sythetic
cgauugucaggaggaugaug

SEQ ID NO: 752 - RNA, 21 nt, Artificial Sequence
  Sythetic
ucgauugucaggaggaugaug

SEQ ID NO: 753 - RNA, 22 nt, Artificial Sequence
  Sythetic
aucgauugucaggaggaugaug

SEQ ID NO: 754 - RNA, 23 nt, Artificial Sequence
  Sythetic
uaucgauugucaggaggaugaug

SEQ ID NO: 755 - RNA, 24 nt, Artificial Sequence
  Sythetic
cuaucgauugucaggaggaugaug

SEQ ID NO: 756 - RNA, 18 nt, Artificial Sequence
  Sythetic
cugguaaagaugauuccu

SEQ ID NO: 757 - RNA, 19 nt, Artificial Sequence
  Sythetic
ucugguaaagaugauuccu

SEQ ID NO: 758 - RNA, 20 nt, Artificial Sequence
  Sythetic
aucugguaaagaugauuccu

SEQ ID NO: 759 - RNA, 21 nt, Artificial Sequence
  Sythetic
gaucugguaaagaugauuccu

SEQ ID NO: 760 - RNA, 22 nt, Artificial Sequence
  Sythetic
agaucugguaaagaugauuccu

SEQ ID NO: 761 - RNA, 23 nt, Artificial Sequence
  Sythetic
gagaucugguaaagaugauuccu

SEQ ID NO: 762 - RNA, 24 nt, Artificial Sequence
  Sythetic
ugagaucugguaaagaugauuccu

SEQ ID NO: 763 - RNA, 18 nt, Artificial Sequence
  Sythetic
agcccagaaggggacagu

SEQ ID NO: 764 - RNA, 19 nt, Artificial Sequence
  Sythetic
gagcccagaaggggacagu

SEQ ID NO: 765 - RNA, 20 nt, Artificial Sequence
  Sythetic
ugagcccagaaggggacagu

SEQ ID NO: 766 - RNA, 21 nt, Artificial Sequence
  Sythetic
gugagcccagaaggggacagu

SEQ ID NO: 767 - RNA, 22 nt, Artificial Sequence
  Sythetic
agugagcccagaaggggacagu

SEQ ID NO: 768 - RNA, 23 nt, Artificial Sequence
  Sythetic
uagugagcccagaaggggacagu

SEQ ID NO: 769 - RNA, 24 nt, Artificial Sequence
  Sythetic
auagugagcccagaaggggacagu

SEQ ID NO: 770 - RNA, 18 nt, Artificial Sequence
  Sythetic
uaagaaggaaaaacaggu

SEQ ID NO: 771 - RNA, 19 nt, Artificial Sequence
  Sythetic
guaagaaggaaaaacaggu

SEQ ID NO: 772 - RNA, 20 nt, Artificial Sequence
  Sythetic
aguaagaaggaaaaacaggu

SEQ ID NO: 773 - RNA, 21 nt, Artificial Sequence
  Sythetic
caguaagaaggaaaaacaggu

SEQ ID NO: 774 - RNA, 22 nt, Artificial Sequence
  Sythetic
acaguaagaaggaaaaacaggu

SEQ ID NO: 775 - RNA, 23 nt, Artificial Sequence
  Sythetic
gacaguaagaaggaaaaacaggu

SEQ ID NO: 776 - RNA, 24 nt, Artificial Sequence
  Sythetic
ggacaguaagaaggaaaaacaggu

SEQ ID NO: 777 - RNA, 18 nt, Artificial Sequence
  Sythetic
cagguaccuaucgauugu

SEQ ID NO: 778 - RNA, 19 nt, Artificial Sequence
  Sythetic
ccagguaccuaucgauugu

SEQ ID NO: 779 - RNA, 20 nt, Artificial Sequence
  Sythetic
gccagguaccuaucgauugu

SEQ ID NO: 780 - RNA, 21 nt, Artificial Sequence
  Sythetic
agccagguaccuaucgauugu

SEQ ID NO: 781 - RNA, 22 nt, Artificial Sequence
  Sythetic
cagccagguaccuaucgauugu

SEQ ID NO: 782 - RNA, 23 nt, Artificial Sequence
  Sythetic
acagccagguaccuaucgauugu

SEQ ID NO: 783 - RNA, 24 nt, Artificial Sequence
  Sythetic
gacagccagguaccuaucgauugu

SEQ ID NO: 784 - RNA, 18 nt, Artificial Sequence
  Sythetic
guaaugaagaccuucuuu

SEQ ID NO: 785 - RNA, 19 nt, Artificial Sequence
  Sythetic
uguaaugaagaccuucuuu

SEQ ID NO: 786 - RNA, 20 nt, Artificial Sequence
  Sythetic
guguaaugaagaccuucuuu

SEQ ID NO: 787 - RNA, 18 nt, Artificial Sequence
  Sythetic
ucuuuaccagaucucaaa

SEQ ID NO: 788 - RNA, 19 nt, Artificial Sequence
  Sythetic
aucuuuaccagaucucaaa

SEQ ID NO: 789 - RNA, 20 nt, Artificial Sequence
  Sythetic
caucuuuaccagaucucaaa

SEQ ID NO: 790 - RNA, 21 nt, Artificial Sequence
  Sythetic
ucaucuuuaccagaucucaaa

SEQ ID NO: 791 - RNA, 22 nt, Artificial Sequence
  Sythetic
aucaucuuuaccagaucucaaa

SEQ ID NO: 792 - RNA, 23 nt, Artificial Sequence
  Sythetic
aaucaucuuuaccagaucucaaa

SEQ ID NO: 793 - RNA, 24 nt, Artificial Sequence
  Sythetic
gaaucaucuuuaccagaucucaaa

SEQ ID NO: 794 - RNA, 18 nt, Artificial Sequence
  Sythetic
gacaucaauuauuauaca

SEQ ID NO: 795 - RNA, 19 nt, Artificial Sequence
  Sythetic
ugacaucaauuauuauaca

SEQ ID NO: 796 - RNA, 20 nt, Artificial Sequence
  Sythetic
augacaucaauuauuauaca

SEQ ID NO: 797 - RNA, 21 nt, Artificial Sequence
  Sythetic
uaugacaucaauuauuauaca

SEQ ID NO: 798 - RNA, 22 nt, Artificial Sequence
  Sythetic
cuaugacaucaauuauuauaca

SEQ ID NO: 799 - RNA, 23 nt, Artificial Sequence
  Sythetic
ucuaugacaucaauuauuauaca

SEQ ID NO: 800 - RNA, 24 nt, Artificial Sequence
  Sythetic
aucuaugacaucaauuauuauaca

SEQ ID NO: 801 - RNA, 18 nt, Artificial Sequence
  Sythetic
ucacuaugcugccgccca

SEQ ID NO: 802 - RNA, 19 nt, Artificial Sequence
  Sythetic
cucacuaugcugccgccca

SEQ ID NO: 803 - RNA, 20 nt, Artificial Sequence
  Sythetic
gcucacuaugcugccgccca

SEQ ID NO: 804 - RNA, 21 nt, Artificial Sequence
  Sythetic
ggcucacuaugcugccgccca

SEQ ID NO: 805 - RNA, 22 nt, Artificial Sequence
  Sythetic
gggcucacuaugcugccgccca

SEQ ID NO: 806 - RNA, 23 nt, Artificial Sequence
  Sythetic
ugggcucacuaugcugccgccca

SEQ ID NO: 807 - RNA, 24 nt, Artificial Sequence
  Sythetic
cugggcucacuaugcugccgccca

SEQ ID NO: 808 - RNA, 18 nt, Artificial Sequence
  Sythetic
caaugugucaacucuuga

SEQ ID NO: 809 - RNA, 19 nt, Artificial Sequence
  Sythetic
acaaugugucaacucuuga

SEQ ID NO: 810 - RNA, 20 nt, Artificial Sequence
  Sythetic
uacaaugugucaacucuuga

SEQ ID NO: 811 - RNA, 21 nt, Artificial Sequence
  Sythetic
auacaaugugucaacucuuga

SEQ ID NO: 812 - RNA, 22 nt, Artificial Sequence
  Sythetic
aauacaaugugucaacucuuga

SEQ ID NO: 813 - RNA, 23 nt, Artificial Sequence
  Sythetic
aaauacaaugugucaacucuuga

SEQ ID NO: 814 - RNA, 24 nt, Artificial Sequence
  Sythetic
gaaauacaaugugucaacucuuga

SEQ ID NO: 815 - RNA, 18 nt, Artificial Sequence
  Sythetic
cuguguuugcgucucucc

SEQ ID NO: 816 - RNA, 19 nt, Artificial Sequence
  Sythetic
gcuguguuugcgucucucc

SEQ ID NO: 817 - RNA, 20 nt, Artificial Sequence
  Sythetic
ggcuguguuugcgucucucc

SEQ ID NO: 818 - RNA, 21 nt, Artificial Sequence
  Sythetic
uggcuguguuugcgucucucc

SEQ ID NO: 819 - RNA, 22 nt, Artificial Sequence
  Sythetic
guggcuguguuugcgucucucc

SEQ ID NO: 820 - RNA, 23 nt, Artificial Sequence
  Sythetic
gguggcuguguuugcgucucucc

SEQ ID NO: 821 - RNA, 24 nt, Artificial Sequence
  Sythetic
ugguggcuguguuugcgucucucc

SEQ ID NO: 822 - RNA, 18 nt, Artificial Sequence
  Sythetic
uguguuugcuuuaaaagc

SEQ ID NO: 823 - RNA, 19 nt, Artificial Sequence
  Sythetic
cuguguuugcuuuaaaagc

SEQ ID NO: 824 - RNA, 20 nt, Artificial Sequence
  Sythetic
gcuguguuugcuuuaaaagc

SEQ ID NO: 825 - RNA, 21 nt, Artificial Sequence
  Sythetic
ugcuguguuugcuuuaaaagc

SEQ ID NO: 826 - RNA, 22 nt, Artificial Sequence
  Sythetic
augcuguguuugcuuuaaaagc

SEQ ID NO: 827 - RNA, 23 nt, Artificial Sequence
  Sythetic
caugcuguguuugcuuuaaaagc

SEQ ID NO: 828 - RNA, 24 nt, Artificial Sequence
  Sythetic
ccaugcuguguuugcuuuaaaagc

SEQ ID NO: 829 - RNA, 18 nt, Artificial Sequence
  Sythetic
cacuaugcugccgcccag

SEQ ID NO: 830 - RNA, 19 nt, Artificial Sequence
  Sythetic
ucacuaugcugccgcccag

SEQ ID NO: 831 - RNA, 20 nt, Artificial Sequence
  Sythetic
cucacuaugcugccgcccag

SEQ ID NO: 832 - RNA, 21 nt, Artificial Sequence
  Sythetic
gcucacuaugcugccgcccag

SEQ ID NO: 833 - RNA, 22 nt, Artificial Sequence
  Sythetic
ggcucacuaugcugccgcccag

SEQ ID NO: 834 - RNA, 23 nt, Artificial Sequence
  Sythetic
gggcucacuaugcugccgcccag

SEQ ID NO: 835 - RNA, 24 nt, Artificial Sequence
  Sythetic
ugggcucacuaugcugccgcccag

SEQ ID NO: 836 - RNA, 18 nt, Artificial Sequence
  Sythetic
cugauaaacugcaaaagg

SEQ ID NO: 837 - RNA, 19 nt, Artificial Sequence
  Sythetic
ccugauaaacugcaaaagg

SEQ ID NO: 838 - RNA, 20 nt, Artificial Sequence
  Sythetic
uccugauaaacugcaaaagg

SEQ ID NO: 839 - RNA, 21 nt, Artificial Sequence
  Sythetic
auccugauaaacugcaaaagg

SEQ ID NO: 840 - RNA, 22 nt, Artificial Sequence
  Sythetic
cauccugauaaacugcaaaagg

SEQ ID NO: 841 - RNA, 23 nt, Artificial Sequence
  Sythetic
ucauccugauaaacugcaaaagg

SEQ ID NO: 842 - RNA, 24 nt, Artificial Sequence
  Sythetic
cucauccugauaaacugcaaaagg

SEQ ID NO: 843 - RNA, 18 nt, Artificial Sequence
  Sythetic
uuuuuauuuaugcacagg

SEQ ID NO: 844 - RNA, 19 nt, Artificial Sequence
  Sythetic
cuuuuuauuuaugcacagg

SEQ ID NO: 845 - RNA, 20 nt, Artificial Sequence
  Sythetic
acuuuuuauuuaugcacagg

SEQ ID NO: 846 - RNA, 18 nt, Artificial Sequence
  Sythetic
uuuuauuuaugcacaggg

SEQ ID NO: 847 - RNA, 19 nt, Artificial Sequence
  Sythetic
uuuuuauuuaugcacaggg

SEQ ID NO: 848 - RNA, 20 nt, Artificial Sequence
  Sythetic
cuuuuuauuuaugcacaggg

SEQ ID NO: 849 - RNA, 18 nt, Artificial Sequence
  Sythetic
auaaacugcaaaaggcug

SEQ ID NO: 850 - RNA, 19 nt, Artificial Sequence
  Sythetic
gauaaacugcaaaaggcug

SEQ ID NO: 851 - RNA, 20 nt, Artificial Sequence
  Sythetic
ugauaaacugcaaaaggcug

SEQ ID NO: 852 - RNA, 21 nt, Artificial Sequence
  Sythetic
cugauaaacugcaaaaggcug

SEQ ID NO: 853 - RNA, 22 nt, Artificial Sequence
  Sythetic
ccugauaaacugcaaaaggcug

SEQ ID NO: 854 - RNA, 23 nt, Artificial Sequence
  Sythetic
uccugauaaacugcaaaaggcug

SEQ ID NO: 855 - RNA, 24 nt, Artificial Sequence
  Sythetic
auccugauaaacugcaaaaggcug

SEQ ID NO: 856 - RNA, 18 nt, Artificial Sequence
  Sythetic
cccugccaaaaaaucaau

SEQ ID NO: 857 - RNA, 19 nt, Artificial Sequence
  Sythetic
gcccugccaaaaaaucaau

SEQ ID NO: 858 - RNA, 20 nt, Artificial Sequence
  Sythetic
agcccugccaaaaaaucaau

SEQ ID NO: 859 - RNA, 21 nt, Artificial Sequence
  Sythetic
gagcccugccaaaaaaucaau

SEQ ID NO: 860 - RNA, 22 nt, Artificial Sequence
  Sythetic
ggagcccugccaaaaaaucaau

SEQ ID NO: 861 - RNA, 23 nt, Artificial Sequence
  Sythetic
cggagcccugccaaaaaaucaau

SEQ ID NO: 862 - RNA, 24 nt, Artificial Sequence
  Sythetic
ucggagcccugccaaaaaaucaau

SEQ ID NO: 863 - RNA, 18 nt, Artificial Sequence
  Sythetic
acaucaauuauuauacau

SEQ ID NO: 864 - RNA, 19 nt, Artificial Sequence
  Sythetic
gacaucaauuauuauacau

SEQ ID NO: 865 - RNA, 20 nt, Artificial Sequence
  Sythetic
ugacaucaauuauuauacau

SEQ ID NO: 866 - RNA, 21 nt, Artificial Sequence
  Sythetic
augacaucaauuauuauacau

SEQ ID NO: 867 - RNA, 22 nt, Artificial Sequence
  Sythetic
uaugacaucaauuauuauacau

SEQ ID NO: 868 - RNA, 23 nt, Artificial Sequence
  Sythetic
cuaugacaucaauuauuauacau

SEQ ID NO: 869 - RNA, 24 nt, Artificial Sequence
  Sythetic
ucuaugacaucaauuauuauacau

SEQ ID NO: 870 - RNA, 18 nt, Artificial Sequence
  Sythetic
cugccgcccagugggacu

SEQ ID NO: 871 - RNA, 19 nt, Artificial Sequence
  Sythetic
gcugccgcccagugggacu

SEQ ID NO: 872 - RNA, 20 nt, Artificial Sequence
  Sythetic
ugcugccgcccagugggacu

SEQ ID NO: 873 - RNA, 21 nt, Artificial Sequence
  Sythetic
augcugccgcccagugggacu

SEQ ID NO: 874 - RNA, 22 nt, Artificial Sequence
  Sythetic
uaugcugccgcccagugggacu

SEQ ID NO: 875 - RNA, 23 nt, Artificial Sequence
  Sythetic
cuaugcugccgcccagugggacu

SEQ ID NO: 876 - RNA, 24 nt, Artificial Sequence
  Sythetic
acuaugcugccgcccagugggacu

SEQ ID NO: 877 - RNA, 18 nt, Artificial Sequence
  Sythetic
aagccaggacggucaccu

SEQ ID NO: 878 - RNA, 19 nt, Artificial Sequence
  Sythetic
aaagccaggacggucaccu

SEQ ID NO: 879 - RNA, 20 nt, Artificial Sequence
  Sythetic
aaaagccaggacggucaccu

SEQ ID NO: 880 - RNA, 21 nt, Artificial Sequence
  Sythetic
uaaaagccaggacggucaccu

SEQ ID NO: 881 - RNA, 22 nt, Artificial Sequence
  Sythetic
uuaaaagccaggacggucaccu

SEQ ID NO: 882 - RNA, 23 nt, Artificial Sequence
  Sythetic
uuuaaaagccaggacggucaccu

SEQ ID NO: 883 - RNA, 24 nt, Artificial Sequence
  Sythetic
cuuuaaaagccaggacggucaccu

SEQ ID NO: 884 - RNA, 18 nt, Artificial Sequence
  Sythetic
auuuuauaggcuucuucu

SEQ ID NO: 885 - RNA, 19 nt, Artificial Sequence
  Sythetic
uauuuuauaggcuucuucu

SEQ ID NO: 886 - RNA, 20 nt, Artificial Sequence
  Sythetic
cuauuuuauaggcuucuucu

SEQ ID NO: 887 - RNA, 21 nt, Artificial Sequence
  Sythetic
ucuauuuuauaggcuucuucu

SEQ ID NO: 888 - RNA, 22 nt, Artificial Sequence
  Sythetic
cucuauuuuauaggcuucuucu

SEQ ID NO: 889 - RNA, 23 nt, Artificial Sequence
  Sythetic
gcucuauuuuauaggcuucuucu

SEQ ID NO: 890 - RNA, 24 nt, Artificial Sequence
  Sythetic
ggcucuauuuuauaggcuucuucu

SEQ ID NO: 891 - RNA, 18 nt, Artificial Sequence
  Sythetic
ugccgcccagugggacuu

SEQ ID NO: 892 - RNA, 19 nt, Artificial Sequence
  Sythetic
cugccgcccagugggacuu

SEQ ID NO: 893 - RNA, 20 nt, Artificial Sequence
  Sythetic
gcugccgcccagugggacuu

SEQ ID NO: 894 - RNA, 21 nt, Artificial Sequence
  Sythetic
ugcugccgcccagugggacuu

SEQ ID NO: 895 - RNA, 22 nt, Artificial Sequence
  Sythetic
augcugccgcccagugggacuu

SEQ ID NO: 896 - RNA, 23 nt, Artificial Sequence
  Sythetic
uaugcugccgcccagugggacuu

SEQ ID NO: 897 - RNA, 24 nt, Artificial Sequence
  Sythetic
cuaugcugccgcccagugggacuu

SEQ ID NO: 898 - RNA, 18 nt, Artificial Sequence
  Sythetic
ccuucuuacuguccccuu

SEQ ID NO: 899 - RNA, 19 nt, Artificial Sequence
  Sythetic
uccuucuuacuguccccuu

SEQ ID NO: 900 - RNA, 20 nt, Artificial Sequence
  Sythetic
uuccuucuuacuguccccuu

SEQ ID NO: 901 - RNA, 21 nt, Artificial Sequence
  Sythetic
uuuccuucuuacuguccccuu

SEQ ID NO: 902 - RNA, 22 nt, Artificial Sequence
  Sythetic
uuuuccuucuuacuguccccuu

SEQ ID NO: 903 - RNA, 23 nt, Artificial Sequence
  Sythetic
uuuuuccuucuuacuguccccuu

SEQ ID NO: 904 - RNA, 24 nt, Artificial Sequence
  Sythetic
guuuuuccuucuuacuguccccuu

SEQ ID NO: 905 - RNA, 18 nt, Artificial Sequence
  Sythetic
guguucaucuuugguuuu

SEQ ID NO: 906 - RNA, 19 nt, Artificial Sequence
  Sythetic
gguguucaucuuugguuuu

SEQ ID NO: 907 - RNA, 20 nt, Artificial Sequence
  Sythetic
ugguguucaucuuugguuuu

SEQ ID NO: 908 - RNA, 21 nt, Artificial Sequence
  Sythetic
cugguguucaucuuugguuuu

SEQ ID NO: 909 - RNA, 22 nt, Artificial Sequence
  Sythetic
acugguguucaucuuugguuuu

SEQ ID NO: 910 - RNA, 23 nt, Artificial Sequence
  Sythetic
cacugguguucaucuuugguuuu

SEQ ID NO: 911 - RNA, 24 nt, Artificial Sequence
  Sythetic
ucacugguguucaucuuugguuuu

SEQ ID NO: 912 - RNA, 18 nt, Artificial Sequence
  Sythetic
gauauuuccugcucccca

SEQ ID NO: 913 - RNA, 19 nt, Artificial Sequence
  Sythetic
agauauuuccugcucccca

SEQ ID NO: 914 - RNA, 20 nt, Artificial Sequence
  Sythetic
cagauauuuccugcucccca

SEQ ID NO: 915 - RNA, 21 nt, Artificial Sequence
  Sythetic
acagauauuuccugcucccca

SEQ ID NO: 916 - RNA, 22 nt, Artificial Sequence
  Sythetic
cacagauauuuccugcucccca

SEQ ID NO: 917 - RNA, 23 nt, Artificial Sequence
  Sythetic
ccacagauauuuccugcucccca

SEQ ID NO: 918 - RNA, 24 nt, Artificial Sequence
  Sythetic
cccacagauauuuccugcucccca

SEQ ID NO: 919 - RNA, 18 nt, Artificial Sequence
  Sythetic
cugcaauuauucaggcca

SEQ ID NO: 920 - RNA, 19 nt, Artificial Sequence
  Sythetic
acugcaauuauucaggcca

SEQ ID NO: 921 - RNA, 20 nt, Artificial Sequence
  Sythetic
uacugcaauuauucaggcca

SEQ ID NO: 922 - RNA, 21 nt, Artificial Sequence
  Sythetic
cuacugcaauuauucaggcca

SEQ ID NO: 923 - RNA, 22 nt, Artificial Sequence
  Sythetic
gcuacugcaauuauucaggcca

SEQ ID NO: 924 - RNA, 23 nt, Artificial Sequence
  Sythetic
agcuacugcaauuauucaggcca

SEQ ID NO: 925 - RNA, 24 nt, Artificial Sequence
  Sythetic
gagcuacugcaauuauucaggcca

SEQ ID NO: 926 - RNA, 18 nt, Artificial Sequence
  Sythetic
uuccugcuccccagugga

SEQ ID NO: 927 - RNA, 19 nt, Artificial Sequence
  Sythetic
uuuccugcuccccagugga

SEQ ID NO: 928 - RNA, 20 nt, Artificial Sequence
  Sythetic
auuuccugcuccccagugga

SEQ ID NO: 929 - RNA, 21 nt, Artificial Sequence
  Sythetic
uauuuccugcuccccagugga

SEQ ID NO: 930 - RNA, 22 nt, Artificial Sequence
  Sythetic
auauuuccugcuccccagugga

SEQ ID NO: 931 - RNA, 23 nt, Artificial Sequence
  Sythetic
gauauuuccugcuccccagugga

SEQ ID NO: 932 - RNA, 24 nt, Artificial Sequence
  Sythetic
agauauuuccugcuccccagugga

SEQ ID NO: 933 - RNA, 18 nt, Artificial Sequence
  Sythetic
cgacaaaggcauagauga

SEQ ID NO: 934 - RNA, 19 nt, Artificial Sequence
  Sythetic
ccgacaaaggcauagauga

SEQ ID NO: 935 - RNA, 20 nt, Artificial Sequence
  Sythetic
cccgacaaaggcauagauga

SEQ ID NO: 936 - RNA, 21 nt, Artificial Sequence
  Sythetic
ccccgacaaaggcauagauga

SEQ ID NO: 937 - RNA, 22 nt, Artificial Sequence
  Sythetic
uccccgacaaaggcauagauga

SEQ ID NO: 938 - RNA, 23 nt, Artificial Sequence
  Sythetic
cuccccgacaaaggcauagauga

SEQ ID NO: 939 - RNA, 24 nt, Artificial Sequence
  Sythetic
ucuccccgacaaaggcauagauga

SEQ ID NO: 940 - RNA, 18 nt, Artificial Sequence
  Sythetic
gcagcagugcgucauccc

SEQ ID NO: 941 - RNA, 19 nt, Artificial Sequence
  Sythetic
ugcagcagugcgucauccc

SEQ ID NO: 942 - RNA, 20 nt, Artificial Sequence
  Sythetic
augcagcagugcgucauccc

SEQ ID NO: 943 - RNA, 21 nt, Artificial Sequence
  Sythetic
gaugcagcagugcgucauccc

SEQ ID NO: 944 - RNA, 22 nt, Artificial Sequence
  Sythetic
ugaugcagcagugcgucauccc

SEQ ID NO: 945 - RNA, 23 nt, Artificial Sequence
  Sythetic
uugaugcagcagugcgucauccc

SEQ ID NO: 946 - RNA, 24 nt, Artificial Sequence
  Sythetic
guugaugcagcagugcgucauccc

SEQ ID NO: 947 - RNA, 18 nt, Artificial Sequence
  Sythetic
gcagaguuuuuaggauuc

SEQ ID NO: 948 - RNA, 19 nt, Artificial Sequence
  Sythetic
agcagaguuuuuaggauuc

SEQ ID NO: 949 - RNA, 20 nt, Artificial Sequence
  Sythetic
aagcagaguuuuuaggauuc

SEQ ID NO: 950 - RNA, 21 nt, Artificial Sequence
  Sythetic
gaagcagaguuuuuaggauuc

SEQ ID NO: 951 - RNA, 22 nt, Artificial Sequence
  Sythetic
cgaagcagaguuuuuaggauuc

SEQ ID NO: 952 - RNA, 23 nt, Artificial Sequence
  Sythetic
ccgaagcagaguuuuuaggauuc

SEQ ID NO: 953 - RNA, 24 nt, Artificial Sequence
  Sythetic
accgaagcagaguuuuuaggauuc

SEQ ID NO: 954 - RNA, 18 nt, Artificial Sequence
  Sythetic
aaugucuggaaauucuuc

SEQ ID NO: 955 - RNA, 19 nt, Artificial Sequence
  Sythetic
uaaugucuggaaauucuuc

SEQ ID NO: 956 - RNA, 20 nt, Artificial Sequence
  Sythetic
uuaaugucuggaaauucuuc

SEQ ID NO: 957 - RNA, 21 nt, Artificial Sequence
  Sythetic
uuuaaugucuggaaauucuuc

SEQ ID NO: 958 - RNA, 22 nt, Artificial Sequence
  Sythetic
cuuuaaugucuggaaauucuuc

SEQ ID NO: 959 - RNA, 23 nt, Artificial Sequence
  Sythetic
ucuuuaaugucuggaaauucuuc

SEQ ID NO: 960 - RNA, 24 nt, Artificial Sequence
  Sythetic
aucuuuaaugucuggaaauucuuc

SEQ ID NO: 961 - RNA, 18 nt, Artificial Sequence
  Sythetic
cucauuucgacaccgaag

SEQ ID NO: 962 - RNA, 19 nt, Artificial Sequence
  Sythetic
ucucauuucgacaccgaag

SEQ ID NO: 963 - RNA, 20 nt, Artificial Sequence
  Sythetic
uucucauuucgacaccgaag

SEQ ID NO: 964 - RNA, 21 nt, Artificial Sequence
  Sythetic
cuucucauuucgacaccgaag

SEQ ID NO: 965 - RNA, 22 nt, Artificial Sequence
  Sythetic
ucuucucauuucgacaccgaag

SEQ ID NO: 966 - RNA, 23 nt, Artificial Sequence
  Sythetic
uucuucucauuucgacaccgaag

SEQ ID NO: 967 - RNA, 24 nt, Artificial Sequence
  Sythetic
cuucuucucauuucgacaccgaag

SEQ ID NO: 968 - RNA, 18 nt, Artificial Sequence
  Sythetic
acaccgaagcagaguuuu

SEQ ID NO: 969 - RNA, 19 nt, Artificial Sequence
  Sythetic
gacaccgaagcagaguuuu

SEQ ID NO: 970 - RNA, 20 nt, Artificial Sequence
  Sythetic
cgacaccgaagcagaguuuu

SEQ ID NO: 971 - RNA, 21 nt, Artificial Sequence
  Sythetic
ucgacaccgaagcagaguuuu

SEQ ID NO: 972 - RNA, 22 nt, Artificial Sequence
  Sythetic
uucgacaccgaagcagaguuuu

SEQ ID NO: 973 - RNA, 23 nt, Artificial Sequence
  Sythetic
uuucgacaccgaagcagaguuuu

SEQ ID NO: 974 - RNA, 24 nt, Artificial Sequence
  Sythetic
auuucgacaccgaagcagaguuuu

SEQ ID NO: 975 - RNA, 18 nt, Artificial Sequence
  Sythetic
uucuccugaacaccuucc

SEQ ID NO: 976 - RNA, 19 nt, Artificial Sequence
  Sythetic
cuucuccugaacaccuucc

SEQ ID NO: 977 - RNA, 20 nt, Artificial Sequence
  Sythetic
ccuucuccugaacaccuucc

SEQ ID NO: 978 - RNA, 21 nt, Artificial Sequence
  Sythetic
uccuucuccugaacaccuucc

SEQ ID NO: 979 - RNA, 22 nt, Artificial Sequence
  Sythetic
guccuucuccugaacaccuucc

SEQ ID NO: 980 - RNA, 23 nt, Artificial Sequence
  Sythetic
uguccuucuccugaacaccuucc

SEQ ID NO: 981 - RNA, 24 nt, Artificial Sequence
  Sythetic
uuguccuucuccugaacaccuucc

SEQ ID NO: 982 - RNA, 18 nt, Artificial Sequence
  Sythetic
uuccaggaauucuuuggc

SEQ ID NO: 983 - RNA, 19 nt, Artificial Sequence
  Sythetic
cuuccaggaauucuuuggc

SEQ ID NO: 984 - RNA, 20 nt, Artificial Sequence
  Sythetic
ccuuccaggaauucuuuggc

SEQ ID NO: 985 - RNA, 21 nt, Artificial Sequence
  Sythetic
accuuccaggaauucuuuggc

SEQ ID NO: 986 - RNA, 22 nt, Artificial Sequence
  Sythetic
caccuuccaggaauucuuuggc

SEQ ID NO: 987 - RNA, 23 nt, Artificial Sequence
  Sythetic
acaccuuccaggaauucuuuggc

SEQ ID NO: 988 - RNA, 24 nt, Artificial Sequence
  Sythetic
aacaccuuccaggaauucuuuggc

SEQ ID NO: 989 - RNA, 18 nt, Artificial Sequence
  Sythetic
cauggucaucugcuacuc

SEQ ID NO: 990 - RNA, 19 nt, Artificial Sequence
  Sythetic
ucauggucaucugcuacuc

SEQ ID NO: 991 - RNA, 20 nt, Artificial Sequence
  Sythetic
gucauggucaucugcuacuc

SEQ ID NO: 992 - RNA, 21 nt, Artificial Sequence
  Sythetic
ugucauggucaucugcuacuc

SEQ ID NO: 993 - RNA, 22 nt, Artificial Sequence
  Sythetic
uugucauggucaucugcuacuc

SEQ ID NO: 994 - RNA, 23 nt, Artificial Sequence
  Sythetic
cuugucauggucaucugcuacuc

SEQ ID NO: 995 - RNA, 24 nt, Artificial Sequence
  Sythetic
gcuugucauggucaucugcuacuc

SEQ ID NO: 996 - RNA, 18 nt, Artificial Sequence
  Sythetic
agucaguaucaauucugg

SEQ ID NO: 997 - RNA, 19 nt, Artificial Sequence
  Sythetic
cagucaguaucaauucugg

SEQ ID NO: 998 - RNA, 20 nt, Artificial Sequence
  Sythetic
acagucaguaucaauucugg

SEQ ID NO: 999 - RNA, 21 nt, Artificial Sequence
  Sythetic
uacagucaguaucaauucugg

SEQ ID NO: 1000 - RNA, 22 nt, Artificial Sequence
  Sythetic
auacagucaguaucaauucugg

SEQ ID NO: 1001 - RNA, 23 nt, Artificial Sequence
  Sythetic
cauacagucaguaucaauucugg

SEQ ID NO: 1002 - RNA, 24 nt, Artificial Sequence
  Sythetic
ccauacagucaguaucaauucugg

SEQ ID NO: 1003 - RNA, 18 nt, Artificial Sequence
  Sythetic
gcaggugacagagacucu

SEQ ID NO: 1004 - RNA, 19 nt, Artificial Sequence
  Sythetic
ugcaggugacagagacucu

SEQ ID NO: 1005 - RNA, 20 nt, Artificial Sequence
  Sythetic
augcaggugacagagacucu

SEQ ID NO: 1006 - RNA, 21 nt, Artificial Sequence
  Sythetic
uaugcaggugacagagacucu

SEQ ID NO: 1007 - RNA, 22 nt, Artificial Sequence
  Sythetic
cuaugcaggugacagagacucu

SEQ ID NO: 1008 - RNA, 23 nt, Artificial Sequence
  Sythetic
gcuaugcaggugacagagacucu

SEQ ID NO: 1009 - RNA, 24 nt, Artificial Sequence
  Sythetic
agcuaugcaggugacagagacucu

SEQ ID NO: 1010 - RNA, 18 nt, Artificial Sequence
  Sythetic
gagccucuugcuggaaaa

SEQ ID NO: 1011 - RNA, 19 nt, Artificial Sequence
  Sythetic
ggagccucuugcuggaaaa

SEQ ID NO: 1012 - RNA, 20 nt, Artificial Sequence
  Sythetic
gggagccucuugcuggaaaa

SEQ ID NO: 1013 - RNA, 21 nt, Artificial Sequence
  Sythetic
cgggagccucuugcuggaaaa

SEQ ID NO: 1014 - RNA, 22 nt, Artificial Sequence
  Sythetic
ucgggagccucuugcuggaaaa

SEQ ID NO: 1015 - RNA, 23 nt, Artificial Sequence
  Sythetic
cucgggagccucuugcuggaaaa

SEQ ID NO: 1016 - RNA, 24 nt, Artificial Sequence
  Sythetic
gcucgggagccucuugcuggaaaa

SEQ ID NO: 1017 - RNA, 18 nt, Artificial Sequence
  Sythetic
auacugacuguauggaaa

SEQ ID NO: 1018 - RNA, 19 nt, Artificial Sequence
  Sythetic
gauacugacuguauggaaa

SEQ ID NO: 1019 - RNA, 20 nt, Artificial Sequence
  Sythetic
ugauacugacuguauggaaa

SEQ ID NO: 1020 - RNA, 21 nt, Artificial Sequence
  Sythetic
uugauacugacuguauggaaa

SEQ ID NO: 1021 - RNA, 22 nt, Artificial Sequence
  Sythetic
auugauacugacuguauggaaa

SEQ ID NO: 1022 - RNA, 23 nt, Artificial Sequence
  Sythetic
aauugauacugacuguauggaaa

SEQ ID NO: 1023 - RNA, 24 nt, Artificial Sequence
  Sythetic
gaauugauacugacuguauggaaa

SEQ ID NO: 1024 - RNA, 18 nt, Artificial Sequence
  Sythetic
caguggaucggguguaaa

SEQ ID NO: 1025 - RNA, 19 nt, Artificial Sequence
  Sythetic
ccaguggaucggguguaaa

SEQ ID NO: 1026 - RNA, 20 nt, Artificial Sequence
  Sythetic
cccaguggaucggguguaaa

SEQ ID NO: 1027 - RNA, 21 nt, Artificial Sequence
  Sythetic
ccccaguggaucggguguaaa

SEQ ID NO: 1028 - RNA, 22 nt, Artificial Sequence
  Sythetic
uccccaguggaucggguguaaa

SEQ ID NO: 1029 - RNA, 23 nt, Artificial Sequence
  Sythetic
cuccccaguggaucggguguaaa

SEQ ID NO: 1030 - RNA, 24 nt, Artificial Sequence
  Sythetic
gcuccccaguggaucggguguaaa

SEQ ID NO: 1031 - RNA, 18 nt, Artificial Sequence
  Sythetic
guuguagggagcccagaa

SEQ ID NO: 1032 - RNA, 19 nt, Artificial Sequence
  Sythetic
uguuguagggagcccagaa

SEQ ID NO: 1033 - RNA, 20 nt, Artificial Sequence
  Sythetic
auguuguagggagcccagaa

SEQ ID NO: 1034 - RNA, 21 nt, Artificial Sequence
  Sythetic
aauguuguagggagcccagaa

SEQ ID NO: 1035 - RNA, 22 nt, Artificial Sequence
  Sythetic
caauguuguagggagcccagaa

SEQ ID NO: 1036 - RNA, 23 nt, Artificial Sequence
  Sythetic
acaauguuguagggagcccagaa

SEQ ID NO: 1037 - RNA, 24 nt, Artificial Sequence
  Sythetic
gacaauguuguagggagcccagaa

SEQ ID NO: 1038 - RNA, 18 nt, Artificial Sequence
  Sythetic
cuucuucucauuucgaca

SEQ ID NO: 1039 - RNA, 19 nt, Artificial Sequence
  Sythetic
ucuucuucucauuucgaca

SEQ ID NO: 1040 - RNA, 20 nt, Artificial Sequence
  Sythetic
cucuucuucucauuucgaca

SEQ ID NO: 1041 - RNA, 21 nt, Artificial Sequence
  Sythetic
ccucuucuucucauuucgaca

SEQ ID NO: 1042 - RNA, 22 nt, Artificial Sequence
  Sythetic
gccucuucuucucauuucgaca

SEQ ID NO: 1043 - RNA, 23 nt, Artificial Sequence
  Sythetic
ugccucuucuucucauuucgaca

SEQ ID NO: 1044 - RNA, 24 nt, Artificial Sequence
  Sythetic
gugccucuucuucucauuucgaca

SEQ ID NO: 1045 - RNA, 18 nt, Artificial Sequence
  Sythetic
gaauugauacugacugua

SEQ ID NO: 1046 - RNA, 19 nt, Artificial Sequence
  Sythetic
agaauugauacugacugua

SEQ ID NO: 1047 - RNA, 20 nt, Artificial Sequence
  Sythetic
cagaauugauacugacugua

SEQ ID NO: 1048 - RNA, 21 nt, Artificial Sequence
  Sythetic
ccagaauugauacugacugua

SEQ ID NO: 1049 - RNA, 22 nt, Artificial Sequence
  Sythetic
uccagaauugauacugacugua

SEQ ID NO: 1050 - RNA, 23 nt, Artificial Sequence
  Sythetic
uuccagaauugauacugacugua

SEQ ID NO: 1051 - RNA, 24 nt, Artificial Sequence
  Sythetic
cuuccagaauugauacugacugua

SEQ ID NO: 1052 - RNA, 18 nt, Artificial Sequence
  Sythetic
augagagcugcaggugua

SEQ ID NO: 1053 - RNA, 19 nt, Artificial Sequence
  Sythetic
aaugagagcugcaggugua

SEQ ID NO: 1054 - RNA, 20 nt, Artificial Sequence
  Sythetic
aaaugagagcugcaggugua

SEQ ID NO: 1055 - RNA, 21 nt, Artificial Sequence
  Sythetic
aaaaugagagcugcaggugua

SEQ ID NO: 1056 - RNA, 22 nt, Artificial Sequence
  Sythetic
gaaaaugagagcugcaggugua

SEQ ID NO: 1057 - RNA, 23 nt, Artificial Sequence
  Sythetic
ggaaaaugagagcugcaggugua

SEQ ID NO: 1058 - RNA, 24 nt, Artificial Sequence
  Sythetic
uggaaaaugagagcugcaggugua

SEQ ID NO: 1059 - RNA, 18 nt, Artificial Sequence
  Sythetic
gagaaggacaauguugua

SEQ ID NO: 1060 - RNA, 19 nt, Artificial Sequence
  Sythetic
ggagaaggacaauguugua

SEQ ID NO: 1061 - RNA, 20 nt, Artificial Sequence
  Sythetic
aggagaaggacaauguugua

SEQ ID NO: 1062 - RNA, 21 nt, Artificial Sequence
  Sythetic
caggagaaggacaauguugua

SEQ ID NO: 1063 - RNA, 22 nt, Artificial Sequence
  Sythetic
ucaggagaaggacaauguugua

SEQ ID NO: 1064 - RNA, 23 nt, Artificial Sequence
  Sythetic
uucaggagaaggacaauguugua

SEQ ID NO: 1065 - RNA, 24 nt, Artificial Sequence
  Sythetic
guucaggagaaggacaauguugua

SEQ ID NO: 1066 - RNA, 18 nt, Artificial Sequence
  Sythetic
acaauguuguagggagcc

SEQ ID NO: 1067 - RNA, 19 nt, Artificial Sequence
  Sythetic
gacaauguuguagggagcc

SEQ ID NO: 1068 - RNA, 20 nt, Artificial Sequence
  Sythetic
ggacaauguuguagggagcc

SEQ ID NO: 1069 - RNA, 21 nt, Artificial Sequence
  Sythetic
aggacaauguuguagggagcc

SEQ ID NO: 1070 - RNA, 22 nt, Artificial Sequence
  Sythetic
aaggacaauguuguagggagcc

SEQ ID NO: 1071 - RNA, 23 nt, Artificial Sequence
  Sythetic
gaaggacaauguuguagggagcc

SEQ ID NO: 1072 - RNA, 24 nt, Artificial Sequence
  Sythetic
agaaggacaauguuguagggagcc

SEQ ID NO: 1073 - RNA, 18 nt, Artificial Sequence
  Sythetic
uucaggccaaagaauucc

SEQ ID NO: 1074 - RNA, 19 nt, Artificial Sequence
  Sythetic
auucaggccaaagaauucc

SEQ ID NO: 1075 - RNA, 20 nt, Artificial Sequence
  Sythetic
uauucaggccaaagaauucc

SEQ ID NO: 1076 - RNA, 21 nt, Artificial Sequence
  Sythetic
uuauucaggccaaagaauucc

SEQ ID NO: 1077 - RNA, 22 nt, Artificial Sequence
  Sythetic
auuauucaggccaaagaauucc

SEQ ID NO: 1078 - RNA, 23 nt, Artificial Sequence
  Sythetic
aauuauucaggccaaagaauucc

SEQ ID NO: 1079 - RNA, 24 nt, Artificial Sequence
  Sythetic
caauuauucaggccaaagaauucc

SEQ ID NO: 1080 - RNA, 18 nt, Artificial Sequence
  Sythetic
ucugguaaagaugauucc

SEQ ID NO: 1081 - RNA, 19 nt, Artificial Sequence
  Sythetic
aucugguaaagaugauucc

SEQ ID NO: 1082 - RNA, 20 nt, Artificial Sequence
  Sythetic
gaucugguaaagaugauucc

SEQ ID NO: 1083 - RNA, 21 nt, Artificial Sequence
  Sythetic
agaucugguaaagaugauucc

SEQ ID NO: 1084 - RNA, 22 nt, Artificial Sequence
  Sythetic
gagaucugguaaagaugauucc

SEQ ID NO: 1085 - RNA, 23 nt, Artificial Sequence
  Sythetic
ugagaucugguaaagaugauucc

SEQ ID NO: 1086 - RNA, 24 nt, Artificial Sequence
  Sythetic
uugagaucugguaaagaugauucc

SEQ ID NO: 1087 - RNA, 18 nt, Artificial Sequence
  Sythetic
uaaacugagcuugcucgc

SEQ ID NO: 1088 - RNA, 19 nt, Artificial Sequence
  Sythetic
guaaacugagcuugcucgc

SEQ ID NO: 1089 - RNA, 20 nt, Artificial Sequence
  Sythetic
uguaaacugagcuugcucgc

SEQ ID NO: 1090 - RNA, 21 nt, Artificial Sequence
  Sythetic
guguaaacugagcuugcucgc

SEQ ID NO: 1091 - RNA, 22 nt, Artificial Sequence
  Sythetic
gguguaaacugagcuugcucgc

SEQ ID NO: 1092 - RNA, 23 nt, Artificial Sequence
  Sythetic
ggguguaaacugagcuugcucgc

SEQ ID NO: 1093 - RNA, 24 nt, Artificial Sequence
  Sythetic
cggguguaaacugagcuugcucgc

SEQ ID NO: 1094 - RNA, 18 nt, Artificial Sequence
  Sythetic
cgcucgggagccucuugc

SEQ ID NO: 1095 - RNA, 19 nt, Artificial Sequence
  Sythetic
ucgcucgggagccucuugc

SEQ ID NO: 1096 - RNA, 20 nt, Artificial Sequence
  Sythetic
cucgcucgggagccucuugc

SEQ ID NO: 1097 - RNA, 21 nt, Artificial Sequence
  Sythetic
gcucgcucgggagccucuugc

SEQ ID NO: 1098 - RNA, 22 nt, Artificial Sequence
  Sythetic
ugcucgcucgggagccucuugc

SEQ ID NO: 1099 - RNA, 23 nt, Artificial Sequence
  Sythetic
uugcucgcucgggagccucuugc

SEQ ID NO: 1100 - RNA, 24 nt, Artificial Sequence
  Sythetic
cuugcucgcucgggagccucuugc

SEQ ID NO: 1101 - RNA, 18 nt, Artificial Sequence
  Sythetic
aacugagcuugcucgcuc

SEQ ID NO: 1102 - RNA, 19 nt, Artificial Sequence
  Sythetic
aaacugagcuugcucgcuc

SEQ ID NO: 1103 - RNA, 20 nt, Artificial Sequence
  Sythetic
uaaacugagcuugcucgcuc

SEQ ID NO: 1104 - RNA, 21 nt, Artificial Sequence
  Sythetic
guaaacugagcuugcucgcuc

SEQ ID NO: 1105 - RNA, 22 nt, Artificial Sequence
  Sythetic
uguaaacugagcuugcucgcuc

SEQ ID NO: 1106 - RNA, 23 nt, Artificial Sequence
  Sythetic
guguaaacugagcuugcucgcuc

SEQ ID NO: 1107 - RNA, 24 nt, Artificial Sequence
  Sythetic
gguguaaacugagcuugcucgcuc

SEQ ID NO: 1108 - RNA, 18 nt, Artificial Sequence
  Sythetic
augacuaucuuuaauguc

SEQ ID NO: 1109 - RNA, 19 nt, Artificial Sequence
  Sythetic
gaugacuaucuuuaauguc

SEQ ID NO: 1110 - RNA, 20 nt, Artificial Sequence
  Sythetic
agaugacuaucuuuaauguc

SEQ ID NO: 1111 - RNA, 21 nt, Artificial Sequence
  Sythetic
aagaugacuaucuuuaauguc

SEQ ID NO: 1112 - RNA, 22 nt, Artificial Sequence
  Sythetic
caagaugacuaucuuuaauguc

SEQ ID NO: 1113 - RNA, 23 nt, Artificial Sequence
  Sythetic
ccaagaugacuaucuuuaauguc

SEQ ID NO: 1114 - RNA, 24 nt, Artificial Sequence
  Sythetic
cccaagaugacuaucuuuaauguc

SEQ ID NO: 1115 - RNA, 18 nt, Artificial Sequence
  Sythetic
auucaggccaaagaauuc

SEQ ID NO: 1116 - RNA, 19 nt, Artificial Sequence
  Sythetic
uauucaggccaaagaauuc

SEQ ID NO: 1117 - RNA, 20 nt, Artificial Sequence
  Sythetic
uuauucaggccaaagaauuc

SEQ ID NO: 1118 - RNA, 21 nt, Artificial Sequence
  Sythetic
auuauucaggccaaagaauuc

SEQ ID NO: 1119 - RNA, 22 nt, Artificial Sequence
  Sythetic
aauuauucaggccaaagaauuc

SEQ ID NO: 1120 - RNA, 23 nt, Artificial Sequence
  Sythetic
caauuauucaggccaaagaauuc

SEQ ID NO: 1121 - RNA, 24 nt, Artificial Sequence
  Sythetic
gcaauuauucaggccaaagaauuc

SEQ ID NO: 1122 - RNA, 18 nt, Artificial Sequence
  Sythetic
aucugguaaagaugauuc

SEQ ID NO: 1123 - RNA, 19 nt, Artificial Sequence
  Sythetic
gaucugguaaagaugauuc

SEQ ID NO: 1124 - RNA, 20 nt, Artificial Sequence
  Sythetic
agaucugguaaagaugauuc

SEQ ID NO: 1125 - RNA, 21 nt, Artificial Sequence
  Sythetic
gagaucugguaaagaugauuc

SEQ ID NO: 1126 - RNA, 22 nt, Artificial Sequence
  Sythetic
ugagaucugguaaagaugauuc

SEQ ID NO: 1127 - RNA, 23 nt, Artificial Sequence
  Sythetic
uugagaucugguaaagaugauuc

SEQ ID NO: 1128 - RNA, 24 nt, Artificial Sequence
  Sythetic
uuugagaucugguaaagaugauuc

SEQ ID NO: 1129 - RNA, 18 nt, Artificial Sequence
  Sythetic
aauuccuggaagguguuc

SEQ ID NO: 1130 - RNA, 19 nt, Artificial Sequence
  Sythetic
gaauuccuggaagguguuc

SEQ ID NO: 1131 - RNA, 20 nt, Artificial Sequence
  Sythetic
agaauuccuggaagguguuc

SEQ ID NO: 1132 - RNA, 21 nt, Artificial Sequence
  Sythetic
aagaauuccuggaagguguuc

SEQ ID NO: 1133 - RNA, 22 nt, Artificial Sequence
  Sythetic
aaagaauuccuggaagguguuc

SEQ ID NO: 1134 - RNA, 23 nt, Artificial Sequence
  Sythetic
caaagaauuccuggaagguguuc

SEQ ID NO: 1135 - RNA, 24 nt, Artificial Sequence
  Sythetic
ccaaagaauuccuggaagguguuc

SEQ ID NO: 1136 - RNA, 18 nt, Artificial Sequence
  Sythetic
auguuguagggagcccag

SEQ ID NO: 1137 - RNA, 19 nt, Artificial Sequence
  Sythetic
aauguuguagggagcccag

SEQ ID NO: 1138 - RNA, 20 nt, Artificial Sequence
  Sythetic
caauguuguagggagcccag

SEQ ID NO: 1139 - RNA, 21 nt, Artificial Sequence
  Sythetic
acaauguuguagggagcccag

SEQ ID NO: 1140 - RNA, 22 nt, Artificial Sequence
  Sythetic
gacaauguuguagggagcccag

SEQ ID NO: 1141 - RNA, 23 nt, Artificial Sequence
  Sythetic
ggacaauguuguagggagcccag

SEQ ID NO: 1142 - RNA, 24 nt, Artificial Sequence
  Sythetic
aggacaauguuguagggagcccag

SEQ ID NO: 1143 - RNA, 18 nt, Artificial Sequence
  Sythetic
uuccuggaagguguucag

SEQ ID NO: 1144 - RNA, 19 nt, Artificial Sequence
  Sythetic
auuccuggaagguguucag

SEQ ID NO: 1145 - RNA, 20 nt, Artificial Sequence
  Sythetic
aauuccuggaagguguucag

SEQ ID NO: 1146 - RNA, 21 nt, Artificial Sequence
  Sythetic
gaauuccuggaagguguucag

SEQ ID NO: 1147 - RNA, 22 nt, Artificial Sequence
  Sythetic
agaauuccuggaagguguucag

SEQ ID NO: 1148 - RNA, 23 nt, Artificial Sequence
  Sythetic
aagaauuccuggaagguguucag

SEQ ID NO: 1149 - RNA, 24 nt, Artificial Sequence
  Sythetic
aaagaauuccuggaagguguucag

SEQ ID NO: 1150 - RNA, 18 nt, Artificial Sequence
  Sythetic
cuggaagguguucaggag

SEQ ID NO: 1151 - RNA, 19 nt, Artificial Sequence
  Sythetic
ccuggaagguguucaggag

SEQ ID NO: 1152 - RNA, 20 nt, Artificial Sequence
  Sythetic
uccuggaagguguucaggag

SEQ ID NO: 1153 - RNA, 21 nt, Artificial Sequence
  Sythetic
uuccuggaagguguucaggag

SEQ ID NO: 1154 - RNA, 22 nt, Artificial Sequence
  Sythetic
auuccuggaagguguucaggag

SEQ ID NO: 1155 - RNA, 23 nt, Artificial Sequence
  Sythetic
aauuccuggaagguguucaggag

SEQ ID NO: 1156 - RNA, 24 nt, Artificial Sequence
  Sythetic
gaauuccuggaagguguucaggag

SEQ ID NO: 1157 - RNA, 18 nt, Artificial Sequence
  Sythetic
gaccaugacaagcagcgg

SEQ ID NO: 1158 - RNA, 19 nt, Artificial Sequence
  Sythetic
ugaccaugacaagcagcgg

SEQ ID NO: 1159 - RNA, 20 nt, Artificial Sequence
  Sythetic
augaccaugacaagcagcgg

SEQ ID NO: 1160 - RNA, 21 nt, Artificial Sequence
  Sythetic
gaugaccaugacaagcagcgg

SEQ ID NO: 1161 - RNA, 22 nt, Artificial Sequence
  Sythetic
agaugaccaugacaagcagcgg

SEQ ID NO: 1162 - RNA, 23 nt, Artificial Sequence
  Sythetic
cagaugaccaugacaagcagcgg

SEQ ID NO: 1163 - RNA, 24 nt, Artificial Sequence
  Sythetic
gcagaugaccaugacaagcagcgg

SEQ ID NO: 1164 - RNA, 18 nt, Artificial Sequence
  Sythetic
gguaaagaugauuccugg

SEQ ID NO: 1165 - RNA, 19 nt, Artificial Sequence
  Sythetic
ugguaaagaugauuccugg

SEQ ID NO: 1166 - RNA, 20 nt, Artificial Sequence
  Sythetic
cugguaaagaugauuccugg

SEQ ID NO: 1167 - RNA, 21 nt, Artificial Sequence
  Sythetic
ucugguaaagaugauuccugg

SEQ ID NO: 1168 - RNA, 22 nt, Artificial Sequence
  Sythetic
aucugguaaagaugauuccugg

SEQ ID NO: 1169 - RNA, 23 nt, Artificial Sequence
  Sythetic
gaucugguaaagaugauuccugg

SEQ ID NO: 1170 - RNA, 24 nt, Artificial Sequence
  Sythetic
agaucugguaaagaugauuccugg

SEQ ID NO: 1171 - RNA, 18 nt, Artificial Sequence
  Sythetic
uuggcaaugugcuuuugg

SEQ ID NO: 1172 - RNA, 19 nt, Artificial Sequence
  Sythetic
uuuggcaaugugcuuuugg

SEQ ID NO: 1173 - RNA, 20 nt, Artificial Sequence
  Sythetic
guuuggcaaugugcuuuugg

SEQ ID NO: 1174 - RNA, 21 nt, Artificial Sequence
  Sythetic
cguuuggcaaugugcuuuugg

SEQ ID NO: 1175 - RNA, 22 nt, Artificial Sequence
  Sythetic
gcguuuggcaaugugcuuuugg

SEQ ID NO: 1176 - RNA, 23 nt, Artificial Sequence
  Sythetic
agcguuuggcaaugugcuuuugg

SEQ ID NO: 1177 - RNA, 24 nt, Artificial Sequence
  Sythetic
aagcguuuggcaaugugcuuuugg

SEQ ID NO: 1178 - RNA, 18 nt, Artificial Sequence
  Sythetic
ccgacaaaggcauagaug

SEQ ID NO: 1179 - RNA, 19 nt, Artificial Sequence
  Sythetic
cccgacaaaggcauagaug

SEQ ID NO: 1180 - RNA, 20 nt, Artificial Sequence
  Sythetic
ccccgacaaaggcauagaug

SEQ ID NO: 1181 - RNA, 21 nt, Artificial Sequence
  Sythetic
uccccgacaaaggcauagaug

SEQ ID NO: 1182 - RNA, 22 nt, Artificial Sequence
  Sythetic
cuccccgacaaaggcauagaug

SEQ ID NO: 1183 - RNA, 23 nt, Artificial Sequence
  Sythetic
ucuccccgacaaaggcauagaug

SEQ ID NO: 1184 - RNA, 24 nt, Artificial Sequence
  Sythetic
uucuccccgacaaaggcauagaug

SEQ ID NO: 1185 - RNA, 18 nt, Artificial Sequence
  Sythetic
aaauaaacaaucaugaug

SEQ ID NO: 1186 - RNA, 19 nt, Artificial Sequence
  Sythetic
aaaauaaacaaucaugaug

SEQ ID NO: 1187 - RNA, 20 nt, Artificial Sequence
  Sythetic
gaaaauaaacaaucaugaug

SEQ ID NO: 1188 - RNA, 21 nt, Artificial Sequence
  Sythetic
agaaaauaaacaaucaugaug

SEQ ID NO: 1189 - RNA, 22 nt, Artificial Sequence
  Sythetic
gagaaaauaaacaaucaugaug

SEQ ID NO: 1190 - RNA, 23 nt, Artificial Sequence
  Sythetic
agagaaaauaaacaaucaugaug

SEQ ID NO: 1191 - RNA, 24 nt, Artificial Sequence
  Sythetic
aagagaaaauaaacaaucaugaug

SEQ ID NO: 1192 - RNA, 18 nt, Artificial Sequence
  Sythetic
ucgcucgggagccucuug

SEQ ID NO: 1193 - RNA, 19 nt, Artificial Sequence
  Sythetic
cucgcucgggagccucuug

SEQ ID NO: 1194 - RNA, 20 nt, Artificial Sequence
  Sythetic
gcucgcucgggagccucuug

SEQ ID NO: 1195 - RNA, 21 nt, Artificial Sequence
  Sythetic
ugcucgcucgggagccucuug

SEQ ID NO: 1196 - RNA, 22 nt, Artificial Sequence
  Sythetic
uugcucgcucgggagccucuug

SEQ ID NO: 1197 - RNA, 23 nt, Artificial Sequence
  Sythetic
cuugcucgcucgggagccucuug

SEQ ID NO: 1198 - RNA, 24 nt, Artificial Sequence
  Sythetic
gcuugcucgcucgggagccucuug

SEQ ID NO: 1199 - RNA, 18 nt, Artificial Sequence
  Sythetic
aggagaaggacaauguug

SEQ ID NO: 1200 - RNA, 19 nt, Artificial Sequence
  Sythetic
caggagaaggacaauguug

SEQ ID NO: 1201 - RNA, 20 nt, Artificial Sequence
  Sythetic
ucaggagaaggacaauguug

SEQ ID NO: 1202 - RNA, 21 nt, Artificial Sequence
  Sythetic
uucaggagaaggacaauguug

SEQ ID NO: 1203 - RNA, 22 nt, Artificial Sequence
  Sythetic
guucaggagaaggacaauguug

SEQ ID NO: 1204 - RNA, 23 nt, Artificial Sequence
  Sythetic
uguucaggagaaggacaauguug

SEQ ID NO: 1205 - RNA, 24 nt, Artificial Sequence
  Sythetic
guguucaggagaaggacaauguug

SEQ ID NO: 1206 - RNA, 18 nt, Artificial Sequence
  Sythetic
aaaauagaacagcauuug

SEQ ID NO: 1207 - RNA, 19 nt, Artificial Sequence
  Sythetic
gaaaauagaacagcauuug

SEQ ID NO: 1208 - RNA, 20 nt, Artificial Sequence
  Sythetic
ggaaaauagaacagcauuug

SEQ ID NO: 1209 - RNA, 21 nt, Artificial Sequence
  Sythetic
uggaaaauagaacagcauuug

SEQ ID NO: 1210 - RNA, 22 nt, Artificial Sequence
  Sythetic
cuggaaaauagaacagcauuug

SEQ ID NO: 1211 - RNA, 23 nt, Artificial Sequence
  Sythetic
gcuggaaaauagaacagcauuug

SEQ ID NO: 1212 - RNA, 24 nt, Artificial Sequence
  Sythetic
ugcuggaaaauagaacagcauuug

SEQ ID NO: 1213 - RNA, 18 nt, Artificial Sequence
  Sythetic
acugacuguauggaaaau

SEQ ID NO: 1214 - RNA, 19 nt, Artificial Sequence
  Sythetic
uacugacuguauggaaaau

SEQ ID NO: 1215 - RNA, 20 nt, Artificial Sequence
  Sythetic
auacugacuguauggaaaau

SEQ ID NO: 1216 - RNA, 21 nt, Artificial Sequence
  Sythetic
gauacugacuguauggaaaau

SEQ ID NO: 1217 - RNA, 22 nt, Artificial Sequence
  Sythetic
ugauacugacuguauggaaaau

SEQ ID NO: 1218 - RNA, 23 nt, Artificial Sequence
  Sythetic
uugauacugacuguauggaaaau

SEQ ID NO: 1219 - RNA, 24 nt, Artificial Sequence
  Sythetic
auugauacugacuguauggaaaau

SEQ ID NO: 1220 - RNA, 18 nt, Artificial Sequence
  Sythetic
ugcuuuuggaagaagacu

SEQ ID NO: 1221 - RNA, 19 nt, Artificial Sequence
  Sythetic
gugcuuuuggaagaagacu

SEQ ID NO: 1222 - RNA, 20 nt, Artificial Sequence
  Sythetic
ugugcuuuuggaagaagacu

SEQ ID NO: 1223 - RNA, 21 nt, Artificial Sequence
  Sythetic
augugcuuuuggaagaagacu

SEQ ID NO: 1224 - RNA, 22 nt, Artificial Sequence
  Sythetic
aaugugcuuuuggaagaagacu

SEQ ID NO: 1225 - RNA, 23 nt, Artificial Sequence
  Sythetic
caaugugcuuuuggaagaagacu

SEQ ID NO: 1226 - RNA, 24 nt, Artificial Sequence
  Sythetic
gcaaugugcuuuuggaagaagacu

SEQ ID NO: 1227 - RNA, 18 nt, Artificial Sequence
  Sythetic
cugguaaagaugauuccu

SEQ ID NO: 1228 - RNA, 19 nt, Artificial Sequence
  Sythetic
ucugguaaagaugauuccu

SEQ ID NO: 1229 - RNA, 20 nt, Artificial Sequence
  Sythetic
aucugguaaagaugauuccu

SEQ ID NO: 1230 - RNA, 21 nt, Artificial Sequence
  Sythetic
gaucugguaaagaugauuccu

SEQ ID NO: 1231 - RNA, 22 nt, Artificial Sequence
  Sythetic
agaucugguaaagaugauuccu

SEQ ID NO: 1232 - RNA, 23 nt, Artificial Sequence
  Sythetic
gagaucugguaaagaugauuccu

SEQ ID NO: 1233 - RNA, 24 nt, Artificial Sequence
  Sythetic
ugagaucugguaaagaugauuccu

SEQ ID NO: 1234 - RNA, 18 nt, Artificial Sequence
  Sythetic
aaacugagcuugcucgcu

SEQ ID NO: 1235 - RNA, 19 nt, Artificial Sequence
  Sythetic
uaaacugagcuugcucgcu

SEQ ID NO: 1236 - RNA, 20 nt, Artificial Sequence
  Sythetic
guaaacugagcuugcucgcu

SEQ ID NO: 1237 - RNA, 21 nt, Artificial Sequence
  Sythetic
uguaaacugagcuugcucgcu

SEQ ID NO: 1238 - RNA, 22 nt, Artificial Sequence
  Sythetic
guguaaacugagcuugcucgcu

SEQ ID NO: 1239 - RNA, 23 nt, Artificial Sequence
  Sythetic
gguguaaacugagcuugcucgcu

SEQ ID NO: 1240 - RNA, 24 nt, Artificial Sequence
  Sythetic
ggguguaaacugagcuugcucgcu

SEQ ID NO: 1241 - RNA, 18 nt, Artificial Sequence
  Sythetic
gaugacuaucuuuaaugu

SEQ ID NO: 1242 - RNA, 19 nt, Artificial Sequence
  Sythetic
agaugacuaucuuuaaugu

SEQ ID NO: 1243 - RNA, 20 nt, Artificial Sequence
  Sythetic
aagaugacuaucuuuaaugu

SEQ ID NO: 1244 - RNA, 21 nt, Artificial Sequence
  Sythetic
caagaugacuaucuuuaaugu

SEQ ID NO: 1245 - RNA, 22 nt, Artificial Sequence
  Sythetic
ccaagaugacuaucuuuaaugu

SEQ ID NO: 1246 - RNA, 23 nt, Artificial Sequence
  Sythetic
cccaagaugacuaucuuuaaugu

SEQ ID NO: 1247 - RNA, 24 nt, Artificial Sequence
  Sythetic
ccccaagaugacuaucuuuaaugu

SEQ ID NO: 1248 - RNA, 18 nt, Artificial Sequence
  Sythetic
agaauugauacugacugu

SEQ ID NO: 1249 - RNA, 19 nt, Artificial Sequence
  Sythetic
cagaauugauacugacugu

SEQ ID NO: 1250 - RNA, 20 nt, Artificial Sequence
  Sythetic
ccagaauugauacugacugu

SEQ ID NO: 1251 - RNA, 21 nt, Artificial Sequence
  Sythetic
uccagaauugauacugacugu

SEQ ID NO: 1252 - RNA, 22 nt, Artificial Sequence
  Sythetic
uuccagaauugauacugacugu

SEQ ID NO: 1253 - RNA, 23 nt, Artificial Sequence
  Sythetic
cuuccagaauugauacugacugu

SEQ ID NO: 1254 - RNA, 24 nt, Artificial Sequence
  Sythetic
ucuuccagaauugauacugacugu

SEQ ID NO: 1255 - RNA, 18 nt, Artificial Sequence
  Sythetic
uagcuugguccaaccugu

SEQ ID NO: 1256 - RNA, 19 nt, Artificial Sequence
  Sythetic
auagcuugguccaaccugu

SEQ ID NO: 1257 - RNA, 20 nt, Artificial Sequence
  Sythetic
cauagcuugguccaaccugu

SEQ ID NO: 1258 - RNA, 21 nt, Artificial Sequence
  Sythetic
gcauagcuugguccaaccugu

SEQ ID NO: 1259 - RNA, 22 nt, Artificial Sequence
  Sythetic
ugcauagcuugguccaaccugu

SEQ ID NO: 1260 - RNA, 23 nt, Artificial Sequence
  Sythetic
cugcauagcuugguccaaccugu

SEQ ID NO: 1261 - RNA, 24 nt, Artificial Sequence
  Sythetic
ccugcauagcuugguccaaccugu

SEQ ID NO: 1262 - RNA, 18 nt, Artificial Sequence
  Sythetic
ggagaaggacaauguugu

SEQ ID NO: 1263 - RNA, 19 nt, Artificial Sequence
  Sythetic
aggagaaggacaauguugu

SEQ ID NO: 1264 - RNA, 20 nt, Artificial Sequence
  Sythetic
caggagaaggacaauguugu

SEQ ID NO: 1265 - RNA, 21 nt, Artificial Sequence
  Sythetic
ucaggagaaggacaauguugu

SEQ ID NO: 1266 - RNA, 22 nt, Artificial Sequence
  Sythetic
uucaggagaaggacaauguugu

SEQ ID NO: 1267 - RNA, 23 nt, Artificial Sequence
  Sythetic
guucaggagaaggacaauguugu

SEQ ID NO: 1268 - RNA, 24 nt, Artificial Sequence
  Sythetic
uguucaggagaaggacaauguugu

SEQ ID NO: 1269 - RNA, 18 nt, Artificial Sequence
  Sythetic
gcguuuggcaaugugcuu

SEQ ID NO: 1270 - RNA, 19 nt, Artificial Sequence
  Sythetic
agcguuuggcaaugugcuu

SEQ ID NO: 1271 - RNA, 20 nt, Artificial Sequence
  Sythetic
aagcguuuggcaaugugcuu

SEQ ID NO: 1272 - RNA, 21 nt, Artificial Sequence
  Sythetic
gaagcguuuggcaaugugcuu

SEQ ID NO: 1273 - RNA, 22 nt, Artificial Sequence
  Sythetic
agaagcguuuggcaaugugcuu

SEQ ID NO: 1274 - RNA, 23 nt, Artificial Sequence
  Sythetic
cagaagcguuuggcaaugugcuu

SEQ ID NO: 1275 - RNA, 24 nt, Artificial Sequence
  Sythetic
gcagaagcguuuggcaaugugcuu

SEQ ID NO: 1276 - RNA, 18 nt, Artificial Sequence
  Sythetic
gaauuccuggaagguguu

SEQ ID NO: 1277 - RNA, 19 nt, Artificial Sequence
  Sythetic
agaauuccuggaagguguu

SEQ ID NO: 1278 - RNA, 20 nt, Artificial Sequence
  Sythetic
aagaauuccuggaagguguu

SEQ ID NO: 1279 - RNA, 21 nt, Artificial Sequence
  Sythetic
aaagaauuccuggaagguguu

SEQ ID NO: 1280 - RNA, 22 nt, Artificial Sequence
  Sythetic
caaagaauuccuggaagguguu

SEQ ID NO: 1281 - RNA, 23 nt, Artificial Sequence
  Sythetic
ccaaagaauuccuggaagguguu

SEQ ID NO: 1282 - RNA, 24 nt, Artificial Sequence
  Sythetic
gccaaagaauuccuggaagguguu

SEQ ID NO: 1283 - RNA, 18 nt, Artificial Sequence
  Sythetic
cguuuggcaaugugcuuu

SEQ ID NO: 1284 - RNA, 19 nt, Artificial Sequence
  Sythetic
gcguuuggcaaugugcuuu

SEQ ID NO: 1285 - RNA, 20 nt, Artificial Sequence
  Sythetic
agcguuuggcaaugugcuuu

SEQ ID NO: 1286 - RNA, 21 nt, Artificial Sequence
  Sythetic
aagcguuuggcaaugugcuuu

SEQ ID NO: 1287 - RNA, 22 nt, Artificial Sequence
  Sythetic
gaagcguuuggcaaugugcuuu

SEQ ID NO: 1288 - RNA, 23 nt, Artificial Sequence
  Sythetic
agaagcguuuggcaaugugcuuu

SEQ ID NO: 1289 - RNA, 24 nt, Artificial Sequence
  Sythetic
cagaagcguuuggcaaugugcuuu

SEQ ID NO: 1290 - RNA, 18 nt, Artificial Sequence
  Sythetic
guaaugaagaccuucuuu

SEQ ID NO: 1291 - RNA, 19 nt, Artificial Sequence
  Sythetic
uguaaugaagaccuucuuu

SEQ ID NO: 1292 - RNA, 20 nt, Artificial Sequence
  Sythetic
guguaaugaagaccuucuuu

SEQ ID NO: 1293 - RNA, 21 nt, Artificial Sequence
  Sythetic
gguguaaugaagaccuucuuu

SEQ ID NO: 1294 - RNA, 22 nt, Artificial Sequence
  Sythetic
agguguaaugaagaccuucuuu

SEQ ID NO: 1295 - RNA, 23 nt, Artificial Sequence
  Sythetic
cagguguaaugaagaccuucuuu

SEQ ID NO: 1296 - RNA, 24 nt, Artificial Sequence
  Sythetic
gcagguguaaugaagaccuucuuu

SEQ ID NO: 1297 - RNA, 18 nt, Artificial Sequence
  Sythetic
aagacuaagagguaguuu

SEQ ID NO: 1298 - RNA, 19 nt, Artificial Sequence
  Sythetic
gaagacuaagagguaguuu

SEQ ID NO: 1299 - RNA, 20 nt, Artificial Sequence
  Sythetic
agaagacuaagagguaguuu

SEQ ID NO: 1300 - RNA, 21 nt, Artificial Sequence
  Sythetic
aagaagacuaagagguaguuu

SEQ ID NO: 1301 - RNA, 22 nt, Artificial Sequence
  Sythetic
gaagaagacuaagagguaguuu

SEQ ID NO: 1302 - RNA, 23 nt, Artificial Sequence
  Sythetic
ggaagaagacuaagagguaguuu

SEQ ID NO: 1303 - RNA, 24 nt, Artificial Sequence
  Sythetic
uggaagaagacuaagagguaguuu

SEQ ID NO: 1304 - RNA, 18 nt, Artificial Sequence
  Sythetic
ucuuuaccagaucucaaa

SEQ ID NO: 1305 - RNA, 19 nt, Artificial Sequence
  Sythetic
aucuuuaccagaucucaaa

SEQ ID NO: 1306 - RNA, 20 nt, Artificial Sequence
  Sythetic
caucuuuaccagaucucaaa

SEQ ID NO: 1307 - RNA, 21 nt, Artificial Sequence
  Sythetic
ucaucuuuaccagaucucaaa

SEQ ID NO: 1308 - RNA, 22 nt, Artificial Sequence
  Sythetic
aucaucuuuaccagaucucaaa

SEQ ID NO: 1309 - RNA, 23 nt, Artificial Sequence
  Sythetic
aaucaucuuuaccagaucucaaa

SEQ ID NO: 1310 - RNA, 24 nt, Artificial Sequence
  Sythetic
gaaucaucuuuaccagaucucaaa

SEQ ID NO: 1311 - RNA, 18 nt, Artificial Sequence
  Sythetic
cuugugacacggacucaa

SEQ ID NO: 1312 - RNA, 19 nt, Artificial Sequence
  Sythetic
gcuugugacacggacucaa

SEQ ID NO: 1313 - RNA, 20 nt, Artificial Sequence
  Sythetic
ggcuugugacacggacucaa

SEQ ID NO: 1314 - RNA, 21 nt, Artificial Sequence
  Sythetic
gggcuugugacacggacucaa

SEQ ID NO: 1315 - RNA, 22 nt, Artificial Sequence
  Sythetic
ugggcuugugacacggacucaa

SEQ ID NO: 1316 - RNA, 23 nt, Artificial Sequence
  Sythetic
gugggcuugugacacggacucaa

SEQ ID NO: 1317 - RNA, 24 nt, Artificial Sequence
  Sythetic
ugugggcuugugacacggacucaa

SEQ ID NO: 1318 - RNA, 18 nt, Artificial Sequence
  Sythetic
cucugcuucggugucgaa

SEQ ID NO: 1319 - RNA, 19 nt, Artificial Sequence
  Sythetic
acucugcuucggugucgaa

SEQ ID NO: 1320 - RNA, 20 nt, Artificial Sequence
  Sythetic
aacucugcuucggugucgaa

SEQ ID NO: 1321 - RNA, 21 nt, Artificial Sequence
  Sythetic
aaacucugcuucggugucgaa

SEQ ID NO: 1322 - RNA, 22 nt, Artificial Sequence
  Sythetic
aaaacucugcuucggugucgaa

SEQ ID NO: 1323 - RNA, 23 nt, Artificial Sequence
  Sythetic
aaaaacucugcuucggugucgaa

SEQ ID NO: 1324 - RNA, 24 nt, Artificial Sequence
  Sythetic
uaaaaacucugcuucggugucgaa

SEQ ID NO: 1325 - RNA, 18 nt, Artificial Sequence
  Sythetic
caguuuacacccgaucca

SEQ ID NO: 1326 - RNA, 19 nt, Artificial Sequence
  Sythetic
ucaguuuacacccgaucca

SEQ ID NO: 1327 - RNA, 20 nt, Artificial Sequence
  Sythetic
cucaguuuacacccgaucca

SEQ ID NO: 1328 - RNA, 21 nt, Artificial Sequence
  Sythetic
gcucaguuuacacccgaucca

SEQ ID NO: 1329 - RNA, 22 nt, Artificial Sequence
  Sythetic
agcucaguuuacacccgaucca

SEQ ID NO: 1330 - RNA, 23 nt, Artificial Sequence
  Sythetic
aagcucaguuuacacccgaucca

SEQ ID NO: 1331 - RNA, 24 nt, Artificial Sequence
  Sythetic
caagcucaguuuacacccgaucca

SEQ ID NO: 1332 - RNA, 18 nt, Artificial Sequence
  Sythetic
aaaugagaagaagaggca

SEQ ID NO: 1333 - RNA, 19 nt, Artificial Sequence
  Sythetic
gaaaugagaagaagaggca

SEQ ID NO: 1334 - RNA, 20 nt, Artificial Sequence
  Sythetic
cgaaaugagaagaagaggca

SEQ ID NO: 1335 - RNA, 21 nt, Artificial Sequence
  Sythetic
ucgaaaugagaagaagaggca

SEQ ID NO: 1336 - RNA, 22 nt, Artificial Sequence
  Sythetic
gucgaaaugagaagaagaggca

SEQ ID NO: 1337 - RNA, 23 nt, Artificial Sequence
  Sythetic
ugucgaaaugagaagaagaggca

SEQ ID NO: 1338 - RNA, 24 nt, Artificial Sequence
  Sythetic
gugucgaaaugagaagaagaggca

SEQ ID NO: 1339 - RNA, 18 nt, Artificial Sequence
  Sythetic
ccagcaagaggcucccga

SEQ ID NO: 1340 - RNA, 19 nt, Artificial Sequence
  Sythetic
uccagcaagaggcucccga

SEQ ID NO: 1341 - RNA, 20 nt, Artificial Sequence
  Sythetic
uuccagcaagaggcucccga

SEQ ID NO: 1342 - RNA, 21 nt, Artificial Sequence
  Sythetic
uuuccagcaagaggcucccga

SEQ ID NO: 1343 - RNA, 22 nt, Artificial Sequence
  Sythetic
uuuuccagcaagaggcucccga

SEQ ID NO: 1344 - RNA, 23 nt, Artificial Sequence
  Sythetic
auuuuccagcaagaggcucccga

SEQ ID NO: 1345 - RNA, 24 nt, Artificial Sequence
  Sythetic
uauuuuccagcaagaggcucccga

SEQ ID NO: 1346 - RNA, 18 nt, Artificial Sequence
  Sythetic
accaagcuaugcagguga

SEQ ID NO: 1347 - RNA, 19 nt, Artificial Sequence
  Sythetic
gaccaagcuaugcagguga

SEQ ID NO: 1348 - RNA, 20 nt, Artificial Sequence
  Sythetic
ggaccaagcuaugcagguga

SEQ ID NO: 1349 - RNA, 21 nt, Artificial Sequence
  Sythetic
uggaccaagcuaugcagguga

SEQ ID NO: 1350 - RNA, 22 nt, Artificial Sequence
  Sythetic
uuggaccaagcuaugcagguga

SEQ ID NO: 1351 - RNA, 23 nt, Artificial Sequence
  Sythetic
guuggaccaagcuaugcagguga

SEQ ID NO: 1352 - RNA, 24 nt, Artificial Sequence
  Sythetic
gguuggaccaagcuaugcagguga

SEQ ID NO: 1353 - RNA, 18 nt, Artificial Sequence
  Sythetic
aguuuacacccgauccac

SEQ ID NO: 1354 - RNA, 19 nt, Artificial Sequence
  Sythetic
caguuuacacccgauccac

SEQ ID NO: 1355 - RNA, 20 nt, Artificial Sequence
  Sythetic
ucaguuuacacccgauccac

SEQ ID NO: 1356 - RNA, 21 nt, Artificial Sequence
  Sythetic
cucaguuuacacccgauccac

SEQ ID NO: 1357 - RNA, 22 nt, Artificial Sequence
  Sythetic
gcucaguuuacacccgauccac

SEQ ID NO: 1358 - RNA, 23 nt, Artificial Sequence
  Sythetic
agcucaguuuacacccgauccac

SEQ ID NO: 1359 - RNA, 24 nt, Artificial Sequence
  Sythetic
aagcucaguuuacacccgauccac

SEQ ID NO: 1360 - RNA, 18 nt, Artificial Sequence
  Sythetic
uaucugugggcuugugac

SEQ ID NO: 1361 - RNA, 19 nt, Artificial Sequence
  Sythetic
auaucugugggcuugugac

SEQ ID NO: 1362 - RNA, 20 nt, Artificial Sequence
  Sythetic
aauaucugugggcuugugac

SEQ ID NO: 1363 - RNA, 21 nt, Artificial Sequence
  Sythetic
aaauaucugugggcuugugac

SEQ ID NO: 1364 - RNA, 22 nt, Artificial Sequence
  Sythetic
gaaauaucugugggcuugugac

SEQ ID NO: 1365 - RNA, 23 nt, Artificial Sequence
  Sythetic
ggaaauaucugugggcuugugac

SEQ ID NO: 1366 - RNA, 24 nt, Artificial Sequence
  Sythetic
aggaaauaucugugggcuugugac

SEQ ID NO: 1367 - RNA, 18 nt, Artificial Sequence
  Sythetic
gucauggucaucugcuac

SEQ ID NO: 1368 - RNA, 19 nt, Artificial Sequence
  Sythetic
ugucauggucaucugcuac

SEQ ID NO: 1369 - RNA, 20 nt, Artificial Sequence
  Sythetic
uugucauggucaucugcuac

SEQ ID NO: 1370 - RNA, 21 nt, Artificial Sequence
  Sythetic
cuugucauggucaucugcuac

SEQ ID NO: 1371 - RNA, 22 nt, Artificial Sequence
  Sythetic
gcuugucauggucaucugcuac

SEQ ID NO: 1372 - RNA, 23 nt, Artificial Sequence
  Sythetic
ugcuugucauggucaucugcuac

SEQ ID NO: 1373 - RNA, 24 nt, Artificial Sequence
  Sythetic
cugcuugucauggucaucugcuac

SEQ ID NO: 1374 - RNA, 18 nt, Artificial Sequence
  Sythetic
gcuguucuauuuuccagc

SEQ ID NO: 1375 - RNA, 19 nt, Artificial Sequence
  Sythetic
ugcuguucuauuuuccagc

SEQ ID NO: 1376 - RNA, 20 nt, Artificial Sequence
  Sythetic
augcuguucuauuuuccagc

SEQ ID NO: 1377 - RNA, 21 nt, Artificial Sequence
  Sythetic
aaugcuguucuauuuuccagc

SEQ ID NO: 1378 - RNA, 22 nt, Artificial Sequence
  Sythetic
aaaugcuguucuauuuuccagc

SEQ ID NO: 1379 - RNA, 23 nt, Artificial Sequence
  Sythetic
caaaugcuguucuauuuuccagc

SEQ ID NO: 1380 - RNA, 24 nt, Artificial Sequence
  Sythetic
gcaaaugcuguucuauuuuccagc

SEQ ID NO: 1381 - RNA, 18 nt, Artificial Sequence
  Sythetic
cccgauccacuggggagc

SEQ ID NO: 1382 - RNA, 19 nt, Artificial Sequence
  Sythetic
acccgauccacuggggagc

SEQ ID NO: 1383 - RNA, 20 nt, Artificial Sequence
  Sythetic
cacccgauccacuggggagc

SEQ ID NO: 1384 - RNA, 21 nt, Artificial Sequence
  Sythetic
acacccgauccacuggggagc

SEQ ID NO: 1385 - RNA, 22 nt, Artificial Sequence
  Sythetic
uacacccgauccacuggggagc

SEQ ID NO: 1386 - RNA, 23 nt, Artificial Sequence
  Sythetic
uuacacccgauccacuggggagc

SEQ ID NO: 1387 - RNA, 24 nt, Artificial Sequence
  Sythetic
uuuacacccgauccacuggggagc

SEQ ID NO: 1388 - RNA, 18 nt, Artificial Sequence
  Sythetic
acauuaaagauagucauc

SEQ ID NO: 1389 - RNA, 19 nt, Artificial Sequence
  Sythetic
gacauuaaagauagucauc

SEQ ID NO: 1390 - RNA, 20 nt, Artificial Sequence
  Sythetic
agacauuaaagauagucauc

SEQ ID NO: 1391 - RNA, 21 nt, Artificial Sequence
  Sythetic
cagacauuaaagauagucauc

SEQ ID NO: 1392 - RNA, 22 nt, Artificial Sequence
  Sythetic
ccagacauuaaagauagucauc

SEQ ID NO: 1393 - RNA, 23 nt, Artificial Sequence
  Sythetic
uccagacauuaaagauagucauc

SEQ ID NO: 1394 - RNA, 24 nt, Artificial Sequence
  Sythetic
uuccagacauuaaagauagucauc

SEQ ID NO: 1395 - RNA, 18 nt, Artificial Sequence
  Sythetic
ugcaggugacagagacuc

SEQ ID NO: 1396 - RNA, 19 nt, Artificial Sequence
  Sythetic
augcaggugacagagacuc

SEQ ID NO: 1397 - RNA, 20 nt, Artificial Sequence
  Sythetic
uaugcaggugacagagacuc

SEQ ID NO: 1398 - RNA, 21 nt, Artificial Sequence
  Sythetic
cuaugcaggugacagagacuc

SEQ ID NO: 1399 - RNA, 22 nt, Artificial Sequence
  Sythetic
gcuaugcaggugacagagacuc

SEQ ID NO: 1400 - RNA, 23 nt, Artificial Sequence
  Sythetic
agcuaugcaggugacagagacuc

SEQ ID NO: 1401 - RNA, 24 nt, Artificial Sequence
  Sythetic
aagcuaugcaggugacagagacuc

SEQ ID NO: 1402 - RNA, 18 nt, Artificial Sequence
  Sythetic
uuuuccagcaagaggcuc

SEQ ID NO: 1403 - RNA, 19 nt, Artificial Sequence
  Sythetic
auuuuccagcaagaggcuc

SEQ ID NO: 1404 - RNA, 20 nt, Artificial Sequence
  Sythetic
uauuuuccagcaagaggcuc

SEQ ID NO: 1405 - RNA, 21 nt, Artificial Sequence
  Sythetic
cuauuuuccagcaagaggcuc

SEQ ID NO: 1406 - RNA, 22 nt, Artificial Sequence
  Sythetic
ucuauuuuccagcaagaggcuc

SEQ ID NO: 1407 - RNA, 23 nt, Artificial Sequence
  Sythetic
uucuauuuuccagcaagaggcuc

SEQ ID NO: 1408 - RNA, 24 nt, Artificial Sequence
  Sythetic
guucuauuuuccagcaagaggcuc

SEQ ID NO: 1409 - RNA, 18 nt, Artificial Sequence
  Sythetic
uacaacauuguccuucuc

SEQ ID NO: 1410 - RNA, 19 nt, Artificial Sequence
  Sythetic
cuacaacauuguccuucuc

SEQ ID NO: 1411 - RNA, 20 nt, Artificial Sequence
  Sythetic
ccuacaacauuguccuucuc

SEQ ID NO: 1412 - RNA, 21 nt, Artificial Sequence
  Sythetic
cccuacaacauuguccuucuc

SEQ ID NO: 1413 - RNA, 22 nt, Artificial Sequence
  Sythetic
ucccuacaacauuguccuucuc

SEQ ID NO: 1414 - RNA, 23 nt, Artificial Sequence
  Sythetic
cucccuacaacauuguccuucuc

SEQ ID NO: 1415 - RNA, 24 nt, Artificial Sequence
  Sythetic
gcucccuacaacauuguccuucuc

SEQ ID NO: 1416 - RNA, 18 nt, Artificial Sequence
  Sythetic
aucaucuaugccuuuguc

SEQ ID NO: 1417 - RNA, 19 nt, Artificial Sequence
  Sythetic
caucaucuaugccuuuguc

SEQ ID NO: 1418 - RNA, 20 nt, Artificial Sequence
  Sythetic
ccaucaucuaugccuuuguc

SEQ ID NO: 1419 - RNA, 21 nt, Artificial Sequence
  Sythetic
cccaucaucuaugccuuuguc

SEQ ID NO: 1420 - RNA, 22 nt, Artificial Sequence
  Sythetic
ccccaucaucuaugccuuuguc

SEQ ID NO: 1421 - RNA, 23 nt, Artificial Sequence
  Sythetic
accccaucaucuaugccuuuguc

SEQ ID NO: 1422 - RNA, 24 nt, Artificial Sequence
  Sythetic
aaccccaucaucuaugccuuuguc

SEQ ID NO: 1423 - RNA, 18 nt, Artificial Sequence
  Sythetic
uacagucaguaucaauuc

SEQ ID NO: 1424 - RNA, 19 nt, Artificial Sequence
  Sythetic
auacagucaguaucaauuc

SEQ ID NO: 1425 - RNA, 20 nt, Artificial Sequence
  Sythetic
cauacagucaguaucaauuc

SEQ ID NO: 1426 - RNA, 21 nt, Artificial Sequence
  Sythetic
ccauacagucaguaucaauuc

SEQ ID NO: 1427 - RNA, 22 nt, Artificial Sequence
  Sythetic
uccauacagucaguaucaauuc

SEQ ID NO: 1428 - RNA, 23 nt, Artificial Sequence
  Sythetic
uuccauacagucaguaucaauuc

SEQ ID NO: 1429 - RNA, 24 nt, Artificial Sequence
  Sythetic
uuuccauacagucaguaucaauuc

SEQ ID NO: 1430 - RNA, 18 nt, Artificial Sequence
  Sythetic
cuucuccugaacaccuuc

SEQ ID NO: 1431 - RNA, 19 nt, Artificial Sequence
  Sythetic
ccuucuccugaacaccuuc

SEQ ID NO: 1432 - RNA, 20 nt, Artificial Sequence
  Sythetic
uccuucuccugaacaccuuc

SEQ ID NO: 1433 - RNA, 21 nt, Artificial Sequence
  Sythetic
guccuucuccugaacaccuuc

SEQ ID NO: 1434 - RNA, 22 nt, Artificial Sequence
  Sythetic
uguccuucuccugaacaccuuc

SEQ ID NO: 1435 - RNA, 23 nt, Artificial Sequence
  Sythetic
uuguccuucuccugaacaccuuc

SEQ ID NO: 1436 - RNA, 24 nt, Artificial Sequence
  Sythetic
auuguccuucuccugaacaccuuc

SEQ ID NO: 1437 - RNA, 18 nt, Artificial Sequence
  Sythetic
cggugucgaaaugagaag

SEQ ID NO: 1438 - RNA, 19 nt, Artificial Sequence
  Sythetic
ucggugucgaaaugagaag

SEQ ID NO: 1439 - RNA, 20 nt, Artificial Sequence
  Sythetic
uucggugucgaaaugagaag

SEQ ID NO: 1440 - RNA, 21 nt, Artificial Sequence
  Sythetic
cuucggugucgaaaugagaag

SEQ ID NO: 1441 - RNA, 22 nt, Artificial Sequence
  Sythetic
gcuucggugucgaaaugagaag

SEQ ID NO: 1442 - RNA, 23 nt, Artificial Sequence
  Sythetic
ugcuucggugucgaaaugagaag

SEQ ID NO: 1443 - RNA, 24 nt, Artificial Sequence
  Sythetic
cugcuucggugucgaaaugagaag

SEQ ID NO: 1444 - RNA, 18 nt, Artificial Sequence
  Sythetic
acccgauccacuggggag

SEQ ID NO: 1445 - RNA, 19 nt, Artificial Sequence
  Sythetic
cacccgauccacuggggag

SEQ ID NO: 1446 - RNA, 20 nt, Artificial Sequence
  Sythetic
acacccgauccacuggggag

SEQ ID NO: 1447 - RNA, 21 nt, Artificial Sequence
  Sythetic
uacacccgauccacuggggag

SEQ ID NO: 1448 - RNA, 22 nt, Artificial Sequence
  Sythetic
uuacacccgauccacuggggag

SEQ ID NO: 1449 - RNA, 23 nt, Artificial Sequence
  Sythetic
uuuacacccgauccacuggggag

SEQ ID NO: 1450 - RNA, 24 nt, Artificial Sequence
  Sythetic
guuuacacccgauccacuggggag

SEQ ID NO: 1451 - RNA, 18 nt, Artificial Sequence
  Sythetic
cuucggugucgaaaugag

SEQ ID NO: 1452 - RNA, 19 nt, Artificial Sequence
  Sythetic
gcuucggugucgaaaugag

SEQ ID NO: 1453 - RNA, 20 nt, Artificial Sequence
  Sythetic
ugcuucggugucgaaaugag

SEQ ID NO: 1454 - RNA, 21 nt, Artificial Sequence
  Sythetic
cugcuucggugucgaaaugag

SEQ ID NO: 1455 - RNA, 22 nt, Artificial Sequence
  Sythetic
ucugcuucggugucgaaaugag

SEQ ID NO: 1456 - RNA, 23 nt, Artificial Sequence
  Sythetic
cucugcuucggugucgaaaugag

SEQ ID NO: 1457 - RNA, 24 nt, Artificial Sequence
  Sythetic
acucugcuucggugucgaaaugag

SEQ ID NO: 1458 - RNA, 18 nt, Artificial Sequence
  Sythetic
ucaucuaugccuuugucg

SEQ ID NO: 1459 - RNA, 19 nt, Artificial Sequence
  Sythetic
aucaucuaugccuuugucg

SEQ ID NO: 1460 - RNA, 20 nt, Artificial Sequence
  Sythetic
caucaucuaugccuuugucg

SEQ ID NO: 1461 - RNA, 21 nt, Artificial Sequence
  Sythetic
ccaucaucuaugccuuugucg

SEQ ID NO: 1462 - RNA, 22 nt, Artificial Sequence
  Sythetic
cccaucaucuaugccuuugucg

SEQ ID NO: 1463 - RNA, 23 nt, Artificial Sequence
  Sythetic
ccccaucaucuaugccuuugucg

SEQ ID NO: 1464 - RNA, 24 nt, Artificial Sequence
  Sythetic
accccaucaucuaugccuuugucg

SEQ ID NO: 1465 - RNA, 18 nt, Artificial Sequence
  Sythetic
ugcaguagcucuaacagg

SEQ ID NO: 1466 - RNA, 19 nt, Artificial Sequence
  Sythetic
uugcaguagcucuaacagg

SEQ ID NO: 1467 - RNA, 20 nt, Artificial Sequence
  Sythetic
auugcaguagcucuaacagg

SEQ ID NO: 1468 - RNA, 21 nt, Artificial Sequence
  Sythetic
aauugcaguagcucuaacagg

SEQ ID NO: 1469 - RNA, 22 nt, Artificial Sequence
  Sythetic
uaauugcaguagcucuaacagg

SEQ ID NO: 1470 - RNA, 23 nt, Artificial Sequence
  Sythetic
auaauugcaguagcucuaacagg

SEQ ID NO: 1471 - RNA, 24 nt, Artificial Sequence
  Sythetic
aauaauugcaguagcucuaacagg

SEQ ID NO: 1472 - RNA, 18 nt, Artificial Sequence
  Sythetic
aucuaugccuuugucggg

SEQ ID NO: 1473 - RNA, 19 nt, Artificial Sequence
  Sythetic
caucuaugccuuugucggg

SEQ ID NO: 1474 - RNA, 20 nt, Artificial Sequence
  Sythetic
ucaucuaugccuuugucggg

SEQ ID NO: 1475 - RNA, 21 nt, Artificial Sequence
  Sythetic
aucaucuaugccuuugucggg

SEQ ID NO: 1476 - RNA, 22 nt, Artificial Sequence
  Sythetic
caucaucuaugccuuugucggg

SEQ ID NO: 1477 - RNA, 23 nt, Artificial Sequence
  Sythetic
ccaucaucuaugccuuugucggg

SEQ ID NO: 1478 - RNA, 24 nt, Artificial Sequence
  Sythetic
cccaucaucuaugccuuugucggg

SEQ ID NO: 1479 - RNA, 18 nt, Artificial Sequence
  Sythetic
uuuacacccgauccacug

SEQ ID NO: 1480 - RNA, 19 nt, Artificial Sequence
  Sythetic
guuuacacccgauccacug

SEQ ID NO: 1481 - RNA, 20 nt, Artificial Sequence
  Sythetic
aguuuacacccgauccacug

SEQ ID NO: 1482 - RNA, 21 nt, Artificial Sequence
  Sythetic
caguuuacacccgauccacug

SEQ ID NO: 1483 - RNA, 22 nt, Artificial Sequence
  Sythetic
ucaguuuacacccgauccacug

SEQ ID NO: 1484 - RNA, 23 nt, Artificial Sequence
  Sythetic
cucaguuuacacccgauccacug

SEQ ID NO: 1485 - RNA, 24 nt, Artificial Sequence
  Sythetic
gcucaguuuacacccgauccacug

SEQ ID NO: 1486 - RNA, 18 nt, Artificial Sequence
  Sythetic
aaaaacucugcuucggug

SEQ ID NO: 1487 - RNA, 19 nt, Artificial Sequence
  Sythetic
uaaaaacucugcuucggug

SEQ ID NO: 1488 - RNA, 20 nt, Artificial Sequence
  Sythetic
cuaaaaacucugcuucggug

SEQ ID NO: 1489 - RNA, 21 nt, Artificial Sequence
  Sythetic
ccuaaaaacucugcuucggug

SEQ ID NO: 1490 - RNA, 22 nt, Artificial Sequence
  Sythetic
uccuaaaaacucugcuucggug

SEQ ID NO: 1491 - RNA, 23 nt, Artificial Sequence
  Sythetic
auccuaaaaacucugcuucggug

SEQ ID NO: 1492 - RNA, 24 nt, Artificial Sequence
  Sythetic
aauccuaaaaacucugcuucggug

SEQ ID NO: 1493 - RNA, 18 nt, Artificial Sequence
  Sythetic
ccaucaucuaugccuuug

SEQ ID NO: 1494 - RNA, 19 nt, Artificial Sequence
  Sythetic
cccaucaucuaugccuuug

SEQ ID NO: 1495 - RNA, 20 nt, Artificial Sequence
  Sythetic
ccccaucaucuaugccuuug

SEQ ID NO: 1496 - RNA, 21 nt, Artificial Sequence
  Sythetic
accccaucaucuaugccuuug

SEQ ID NO: 1497 - RNA, 22 nt, Artificial Sequence
  Sythetic
aaccccaucaucuaugccuuug

SEQ ID NO: 1498 - RNA, 23 nt, Artificial Sequence
  Sythetic
caaccccaucaucuaugccuuug

SEQ ID NO: 1499 - RNA, 24 nt, Artificial Sequence
  Sythetic
ucaaccccaucaucuaugccuuug

SEQ ID NO: 1500 - RNA, 18 nt, Artificial Sequence
  Sythetic
cugcuucggugucgaaau

SEQ ID NO: 1501 - RNA, 19 nt, Artificial Sequence
  Sythetic
ucugcuucggugucgaaau

SEQ ID NO: 1502 - RNA, 20 nt, Artificial Sequence
  Sythetic
cucugcuucggugucgaaau

SEQ ID NO: 1503 - RNA, 21 nt, Artificial Sequence
  Sythetic
acucugcuucggugucgaaau

SEQ ID NO: 1504 - RNA, 22 nt, Artificial Sequence
  Sythetic
aacucugcuucggugucgaaau

SEQ ID NO: 1505 - RNA, 23 nt, Artificial Sequence
  Sythetic
aaacucugcuucggugucgaaau

SEQ ID NO: 1506 - RNA, 24 nt, Artificial Sequence
  Sythetic
aaaacucugcuucggugucgaaau

SEQ ID NO: 1507 - RNA, 18 nt, Artificial Sequence
  Sythetic
guuuacacccgauccacu

SEQ ID NO: 1508 - RNA, 19 nt, Artificial Sequence
  Sythetic
aguuuacacccgauccacu

SEQ ID NO: 1509 - RNA, 20 nt, Artificial Sequence
  Sythetic
caguuuacacccgauccacu

SEQ ID NO: 1510 - RNA, 21 nt, Artificial Sequence
  Sythetic
ucaguuuacacccgauccacu

SEQ ID NO: 1511 - RNA, 22 nt, Artificial Sequence
  Sythetic
cucaguuuacacccgauccacu

SEQ ID NO: 1512 - RNA, 23 nt, Artificial Sequence
  Sythetic
gcucaguuuacacccgauccacu

SEQ ID NO: 1513 - RNA, 24 nt, Artificial Sequence
  Sythetic
agcucaguuuacacccgauccacu

SEQ ID NO: 1514 - RNA, 18 nt, Artificial Sequence
  Sythetic
ucauggucaucugcuacu

SEQ ID NO: 1515 - RNA, 19 nt, Artificial Sequence
  Sythetic
gucauggucaucugcuacu

SEQ ID NO: 1516 - RNA, 20 nt, Artificial Sequence
  Sythetic
ugucauggucaucugcuacu

SEQ ID NO: 1517 - RNA, 21 nt, Artificial Sequence
  Sythetic
uugucauggucaucugcuacu

SEQ ID NO: 1518 - RNA, 22 nt, Artificial Sequence
  Sythetic
cuugucauggucaucugcuacu

SEQ ID NO: 1519 - RNA, 23 nt, Artificial Sequence
  Sythetic
gcuugucauggucaucugcuacu

SEQ ID NO: 1520 - RNA, 24 nt, Artificial Sequence
  Sythetic
ugcuugucauggucaucugcuacu

SEQ ID NO: 1521 - RNA, 18 nt, Artificial Sequence
  Sythetic
aagaagaggcacagggcu

SEQ ID NO: 1522 - RNA, 19 nt, Artificial Sequence
  Sythetic
gaagaagaggcacagggcu

SEQ ID NO: 1523 - RNA, 20 nt, Artificial Sequence
  Sythetic
agaagaagaggcacagggcu

SEQ ID NO: 1524 - RNA, 21 nt, Artificial Sequence
  Sythetic
gagaagaagaggcacagggcu

SEQ ID NO: 1525 - RNA, 22 nt, Artificial Sequence
  Sythetic
ugagaagaagaggcacagggcu

SEQ ID NO: 1526 - RNA, 23 nt, Artificial Sequence
  Sythetic
augagaagaagaggcacagggcu

SEQ ID NO: 1527 - RNA, 24 nt, Artificial Sequence
  Sythetic
aaugagaagaagaggcacagggcu

SEQ ID NO: 1528 - RNA, 18 nt, Artificial Sequence
  Sythetic
cauuaaagauagucaucu

SEQ ID NO: 1529 - RNA, 19 nt, Artificial Sequence
  Sythetic
acauuaaagauagucaucu

SEQ ID NO: 1530 - RNA, 20 nt, Artificial Sequence
  Sythetic
gacauuaaagauagucaucu

SEQ ID NO: 1531 - RNA, 21 nt, Artificial Sequence
  Sythetic
agacauuaaagauagucaucu

SEQ ID NO: 1532 - RNA, 22 nt, Artificial Sequence
  Sythetic
cagacauuaaagauagucaucu

SEQ ID NO: 1533 - RNA, 23 nt, Artificial Sequence
  Sythetic
ccagacauuaaagauagucaucu

SEQ ID NO: 1534 - RNA, 24 nt, Artificial Sequence
  Sythetic
uccagacauuaaagauagucaucu

SEQ ID NO: 1535 - RNA, 18 nt, Artificial Sequence
  Sythetic
ggggagcaggaaauaucu

SEQ ID NO: 1536 - RNA, 19 nt, Artificial Sequence
  Sythetic
uggggagcaggaaauaucu

SEQ ID NO: 1537 - RNA, 20 nt, Artificial Sequence
  Sythetic
cuggggagcaggaaauaucu

SEQ ID NO: 1538 - RNA, 21 nt, Artificial Sequence
  Sythetic
acuggggagcaggaaauaucu

SEQ ID NO: 1539 - RNA, 22 nt, Artificial Sequence
  Sythetic
cacuggggagcaggaaauaucu

SEQ ID NO: 1540 - RNA, 23 nt, Artificial Sequence
  Sythetic
ccacuggggagcaggaaauaucu

SEQ ID NO: 1541 - RNA, 24 nt, Artificial Sequence
  Sythetic
uccacuggggagcaggaaauaucu

SEQ ID NO: 1542 - RNA, 18 nt, Artificial Sequence
  Sythetic
caucaucuaugccuuugu

SEQ ID NO: 1543 - RNA, 19 nt, Artificial Sequence
  Sythetic
ccaucaucuaugccuuugu

SEQ ID NO: 1544 - RNA, 20 nt, Artificial Sequence
  Sythetic
cccaucaucuaugccuuugu

SEQ ID NO: 1545 - RNA, 21 nt, Artificial Sequence
  Sythetic
ccccaucaucuaugccuuugu

SEQ ID NO: 1546 - RNA, 22 nt, Artificial Sequence
  Sythetic
accccaucaucuaugccuuugu

SEQ ID NO: 1547 - RNA, 23 nt, Artificial Sequence
  Sythetic
aaccccaucaucuaugccuuugu

SEQ ID NO: 1548 - RNA, 24 nt, Artificial Sequence
  Sythetic
caaccccaucaucuaugccuuugu

SEQ ID NO: 1549 - RNA, 18 nt, Artificial Sequence
  Sythetic
auacagucaguaucaauu

SEQ ID NO: 1550 - RNA, 19 nt, Artificial Sequence
  Sythetic
cauacagucaguaucaauu

SEQ ID NO: 1551 - RNA, 20 nt, Artificial Sequence
  Sythetic
ccauacagucaguaucaauu

SEQ ID NO: 1552 - RNA, 21 nt, Artificial Sequence
  Sythetic
uccauacagucaguaucaauu

SEQ ID NO: 1553 - RNA, 22 nt, Artificial Sequence
  Sythetic
uuccauacagucaguaucaauu

SEQ ID NO: 1554 - RNA, 23 nt, Artificial Sequence
  Sythetic
uuuccauacagucaguaucaauu

SEQ ID NO: 1555 - RNA, 24 nt, Artificial Sequence
  Sythetic
uuuuccauacagucaguaucaauu

SEQ ID NO: 1556 - RNA, 18 nt, Artificial Sequence
  Sythetic
gauuguuuauuuucucuu

SEQ ID NO: 1557 - RNA, 19 nt, Artificial Sequence
  Sythetic
ugauuguuuauuuucucuu

SEQ ID NO: 1558 - RNA, 20 nt, Artificial Sequence
  Sythetic
augauuguuuauuuucucuu

SEQ ID NO: 1559 - RNA, 21 nt, Artificial Sequence
  Sythetic
caugauuguuuauuuucucuu

SEQ ID NO: 1560 - RNA, 22 nt, Artificial Sequence
  Sythetic
ucaugauuguuuauuuucucuu

SEQ ID NO: 1561 - RNA, 23 nt, Artificial Sequence
  Sythetic
aucaugauuguuuauuuucucuu

SEQ ID NO: 1562 - RNA, 24 nt, Artificial Sequence
  Sythetic
caucaugauuguuuauuuucucuu

SEQ ID NO: 1563 - RNA, 18 nt, Artificial Sequence
  Sythetic
cuuugucggggagaaguu

SEQ ID NO: 1564 - RNA, 19 nt, Artificial Sequence
  Sythetic
ccuuugucggggagaaguu

SEQ ID NO: 1565 - RNA, 20 nt, Artificial Sequence
  Sythetic
gccuuugucggggagaaguu

SEQ ID NO: 1566 - RNA, 21 nt, Artificial Sequence
  Sythetic
ugccuuugucggggagaaguu

SEQ ID NO: 1567 - RNA, 22 nt, Artificial Sequence
  Sythetic
augccuuugucggggagaaguu

SEQ ID NO: 1568 - RNA, 23 nt, Artificial Sequence
  Sythetic
uaugccuuugucggggagaaguu

SEQ ID NO: 1569 - RNA, 24 nt, Artificial Sequence
  Sythetic
cuaugccuuugucggggagaaguu

SEQ ID NO: 1570 - RNA, 17 nt, Artificial Sequence
  Sythetic
ugcacaggguggaacaa

SEQ ID NO: 1571 - RNA, 17 nt, Artificial Sequence
  Sythetic
ggcugcgauuugcuuca

SEQ ID NO: 1572 - RNA, 17 nt, Artificial Sequence
  Sythetic
gacgacagccagguacc

SEQ ID NO: 1573 - RNA, 17 nt, Artificial Sequence
  Sythetic
cggaggcaggaggcggg

SEQ ID NO: 1574 - RNA, 17 nt, Artificial Sequence
  Sythetic
uguauaauaauugaugu

SEQ ID NO: 1575 - RNA, 17 nt, Artificial Sequence
  Sythetic
gcugucguccaugcugu

SEQ ID NO: 1576 - RNA, 17 nt, Artificial Sequence
  Sythetic
ugacagggcucuauuuu

SEQ ID NO: 1577 - RNA, 20 nt, Artificial Sequence
  Sythetic
uuaugcacaggguggaacaa

SEQ ID NO: 1578 - RNA, 20 nt, Artificial Sequence
  Sythetic
gcgggcugcgauuugcuuca

SEQ ID NO: 1579 - RNA, 20 nt, Artificial Sequence
  Sythetic
auggacgacagccagguacc

SEQ ID NO: 1580 - RNA, 20 nt, Artificial Sequence
  Sythetic
gagcggaggcaggaggcggg

SEQ ID NO: 1581 - RNA, 20 nt, Artificial Sequence
  Sythetic
cgauguauaauaauugaugu

SEQ ID NO: 1582 - RNA, 20 nt, Artificial Sequence
  Sythetic
ucuugacagggcucuauuuu

SEQ ID NO: 1583 - RNA, 17 nt, Artificial Sequence
  Sythetic
uuuuugagaucugguaa

SEQ ID NO: 1584 - RNA, 17 nt, Artificial Sequence
  Sythetic
ugucaggaggaugauga

SEQ ID NO: 1585 - RNA, 17 nt, Artificial Sequence
  Sythetic
gcaggaggcgggcugcg

SEQ ID NO: 1586 - RNA, 17 nt, Artificial Sequence
  Sythetic
accccaaaggugaccgu

SEQ ID NO: 1587 - RNA, 20 nt, Artificial Sequence
  Sythetic
uucuuuuugagaucugguaa

SEQ ID NO: 1588 - RNA, 20 nt, Artificial Sequence
  Sythetic
gauugucaggaggaugauga

SEQ ID NO: 1589 - RNA, 20 nt, Artificial Sequence
  Sythetic
gaggcaggaggcgggcugcg

SEQ ID NO: 1590 - RNA, 20 nt, Artificial Sequence
  Sythetic
accaccccaaaggugaccgu

SEQ ID NO: 1591 - RNA, 20 nt, Artificial Sequence
  Sythetic
cuggcugucguccaugcugu

SEQ ID NO: 1592 - RNA, 17 nt, Artificial Sequence
  Sythetic
cucgggaauccuaaaaa

SEQ ID NO: 1593 - RNA, 17 nt, Artificial Sequence
  Sythetic
aguggaucggguguaaa

SEQ ID NO: 1594 - RNA, 17 nt, Artificial Sequence
  Sythetic
uuuuugagaucugguaa

SEQ ID NO: 1595 - RNA, 17 nt, Artificial Sequence
  Sythetic
gaggcuuaucuucacca

SEQ ID NO: 1596 - RNA, 17 nt, Artificial Sequence
  Sythetic
ugcagaagcguuuggca

SEQ ID NO: 1597 - RNA, 17 nt, Artificial Sequence
  Sythetic
uccaaaagcacauugcc

SEQ ID NO: 1598 - RNA, 17 nt, Artificial Sequence
  Sythetic
cuuggggcugguccugc

SEQ ID NO: 1599 - RNA, 17 nt, Artificial Sequence
  Sythetic
agagucucugucaccug

SEQ ID NO: 1600 - RNA, 17 nt, Artificial Sequence
  Sythetic
gaagaggcacagggcug

SEQ ID NO: 1601 - RNA, 17 nt, Artificial Sequence
  Sythetic
gggagcaggaaauaucu

SEQ ID NO: 1602 - RNA, 17 nt, Artificial Sequence
  Sythetic
acaccgaagcagaguuu

SEQ ID NO: 1603 - RNA, 20 nt, Artificial Sequence
  Sythetic
cuacucgggaauccuaaaaa

SEQ ID NO: 1604 - RNA, 20 nt, Artificial Sequence
  Sythetic
cccaguggaucggguguaaa

SEQ ID NO: 1605 - RNA, 20 nt, Artificial Sequence
  Sythetic
uucuuuuugagaucugguaa

SEQ ID NO: 1606 - RNA, 20 nt, Artificial Sequence
  Sythetic
ugugaggcuuaucuucacca

SEQ ID NO: 1607 - RNA, 20 nt, Artificial Sequence
  Sythetic
auuugcagaagcguuuggca

SEQ ID NO: 1608 - RNA, 20 nt, Artificial Sequence
  Sythetic
ucuuccaaaagcacauugcc

SEQ ID NO: 1609 - RNA, 20 nt, Artificial Sequence
  Sythetic
caucuuggggcugguccugc

SEQ ID NO: 1610 - RNA, 20 nt, Artificial Sequence
  Sythetic
ccaagagucucugucaccug

SEQ ID NO: 1611 - RNA, 20 nt, Artificial Sequence
  Sythetic
gaagaagaggcacagggcug

SEQ ID NO: 1612 - RNA, 20 nt, Artificial Sequence
  Sythetic
cuggggagcaggaaauaucu

SEQ ID NO: 1613 - RNA, 20 nt, Artificial Sequence
  Sythetic
ucgacaccgaagcagaguuu

SEQ ID NO: 1614 - RNA, 17 nt, Artificial Sequence
  Sythetic
cucagaagcuaacuaac

SEQ ID NO: 1615 - RNA, 17 nt, Artificial Sequence
  Sythetic
uuacgggcuuuucucac

SEQ ID NO: 1616 - RNA, 17 nt, Artificial Sequence
  Sythetic
ugagagguuacuuaccg

SEQ ID NO: 1617 - RNA, 20 nt, Artificial Sequence
  Sythetic
agaauagaucucuggucuga

SEQ ID NO: 1618 - RNA, 20 nt, Artificial Sequence
  Sythetic
cuggucugaagguuuauuua

SEQ ID NO: 1619 - RNA, 20 nt, Artificial Sequence
  Sythetic
caucucagaagcuaacuaac

SEQ ID NO: 1620 - RNA, 20 nt, Artificial Sequence
  Sythetic
uggucugaagguuuauuuac

SEQ ID NO: 1621 - RNA, 20 nt, Artificial Sequence
  Sythetic
ccccuacaagaaacucuccc

SEQ ID NO: 1622 - RNA, 20 nt, Artificial Sequence
  Sythetic
gauaggggauacggggagag

SEQ ID NO: 1623 - RNA, 20 nt, Artificial Sequence
  Sythetic
ccggggagaguuucuuguag

SEQ ID NO: 1624 - RNA, 20 nt, Artificial Sequence
  Sythetic
agcugagagguuacuuaccg

SEQ ID NO: 1625 - RNA, 20 nt, Artificial Sequence
  Sythetic
aagauaauuguaugagcacu

SEQ ID NO: 1626 - RNA, 20 nt, Artificial Sequence
  Sythetic
ucccccucuacauuuaaagu

SEQ ID NO: 1627 - RNA, 17 nt, Artificial Sequence
  Sythetic
gggagaguggagaaaaa

SEQ ID NO: 1628 - RNA, 17 nt, Artificial Sequence
  Sythetic
ggggagaguggagaaaa

SEQ ID NO: 1629 - RNA, 17 nt, Artificial Sequence
  Sythetic
ucuuuaagauaaggaaa

SEQ ID NO: 1630 - RNA, 17 nt, Artificial Sequence
  Sythetic
ucaacaguaaggcuaaa

SEQ ID NO: 1631 - RNA, 17 nt, Artificial Sequence
  Sythetic
gagugaaagacuuuaaa

SEQ ID NO: 1632 - RNA, 17 nt, Artificial Sequence
  Sythetic
aucuuuaagauaaggaa

SEQ ID NO: 1633 - RNA, 17 nt, Artificial Sequence
  Sythetic
aguuucuuguaggggaa

SEQ ID NO: 1634 - RNA, 17 nt, Artificial Sequence
  Sythetic
gaaaauauaaagaauaa

SEQ ID NO: 1635 - RNA, 17 nt, Artificial Sequence
  Sythetic
ugagugaaagacuuuaa

SEQ ID NO: 1636 - RNA, 17 nt, Artificial Sequence
  Sythetic
gagaaaaaggggacaca

SEQ ID NO: 1637 - RNA, 17 nt, Artificial Sequence
  Sythetic
auuuguacaagaucaca

SEQ ID NO: 1638 - RNA, 17 nt, Artificial Sequence
  Sythetic
uuggaaugaguuucaga

SEQ ID NO: 1639 - RNA, 17 nt, Artificial Sequence
  Sythetic
aggcaucucacuggaga

SEQ ID NO: 1640 - RNA, 17 nt, Artificial Sequence
  Sythetic
ccaacuuuaaauguaga

SEQ ID NO: 1641 - RNA, 17 nt, Artificial Sequence
  Sythetic
cuguuucuuuugaagga

SEQ ID NO: 1642 - RNA, 17 nt, Artificial Sequence
  Sythetic
auagaucucuggucuga

SEQ ID NO: 1643 - RNA, 17 nt, Artificial Sequence
  Sythetic
aucauuaaguguauuga

SEQ ID NO: 1644 - RNA, 17 nt, Artificial Sequence
  Sythetic
aaugcuguuucuuuuga

SEQ ID NO: 1645 - RNA, 17 nt, Artificial Sequence
  Sythetic
auauaaucuuuaagaua

SEQ ID NO: 1646 - RNA, 17 nt, Artificial Sequence
  Sythetic
gggugggauaggggaua

SEQ ID NO: 1647 - RNA, 17 nt, Artificial Sequence
  Sythetic
gggguuggggugggaua

SEQ ID NO: 1648 - RNA, 17 nt, Artificial Sequence
  Sythetic
aaucuuaucuucugcua

SEQ ID NO: 1649 - RNA, 17 nt, Artificial Sequence
  Sythetic
uugccaaaugucuucua

SEQ ID NO: 1650 - RNA, 17 nt, Artificial Sequence
  Sythetic
agggcuuuucaacagua

SEQ ID NO: 1651 - RNA, 17 nt, Artificial Sequence
  Sythetic
cuuucuuuugagaggua

SEQ ID NO: 1652 - RNA, 17 nt, Artificial Sequence
  Sythetic
ggggagaguuucuugua

SEQ ID NO: 1653 - RNA, 17 nt, Artificial Sequence
  Sythetic
gucugaagguuuauuua

SEQ ID NO: 1654 - RNA, 17 nt, Artificial Sequence
  Sythetic
ggagaaaaaggggacac

SEQ ID NO: 1655 - RNA, 17 nt, Artificial Sequence
  Sythetic
gauuuguacaagaucac

SEQ ID NO: 1656 - RNA, 17 nt, Artificial Sequence
  Sythetic
uucagaaggcaucucac

SEQ ID NO: 1657 - RNA, 17 nt, Artificial Sequence
  Sythetic
ggugggauaggggauac

SEQ ID NO: 1658 - RNA, 17 nt, Artificial Sequence
  Sythetic
gcugagagguuacuuac

SEQ ID NO: 1659 - RNA, 17 nt, Artificial Sequence
  Sythetic
ucugaagguuuauuuac

SEQ ID NO: 1660 - RNA, 17 nt, Artificial Sequence
  Sythetic
ugaguaaaagacuuuac

SEQ ID NO: 1661 - RNA, 17 nt, Artificial Sequence
  Sythetic
cugagagguuacuuacc

SEQ ID NO: 1662 - RNA, 17 nt, Artificial Sequence
  Sythetic
cuacaagaaacucuccc

SEQ ID NO: 1663 - RNA, 17 nt, Artificial Sequence
  Sythetic
aauguagagggggaucc

SEQ ID NO: 1664 - RNA, 17 nt, Artificial Sequence
  Sythetic
ggguuaaugugaagucc

SEQ ID NO: 1665 - RNA, 17 nt, Artificial Sequence
  Sythetic
gauuugcacagcucauc

SEQ ID NO: 1666 - RNA, 17 nt, Artificial Sequence
  Sythetic
gcuagagaauagaucuc

SEQ ID NO: 1667 - RNA, 17 nt, Artificial Sequence
  Sythetic
ggaugucucagcucuuc

SEQ ID NO: 1668 - RNA, 17 nt, Artificial Sequence
  Sythetic
ggagaguggagaaaaag

SEQ ID NO: 1669 - RNA, 17 nt, Artificial Sequence
  Sythetic
aggggauacggggagag

SEQ ID NO: 1670 - RNA, 17 nt, Artificial Sequence
  Sythetic
caacuuuaaauguagag

SEQ ID NO: 1671 - RNA, 17 nt, Artificial Sequence
  Sythetic
aaggcaucucacuggag

SEQ ID NO: 1672 - RNA, 17 nt, Artificial Sequence
  Sythetic
caggccaagcagcugag

SEQ ID NO: 1673 - RNA, 17 nt, Artificial Sequence
  Sythetic
caaaucuuucuuuugag

SEQ ID NO: 1674 - RNA, 17 nt, Artificial Sequence
  Sythetic
ggguuggggugggauag

SEQ ID NO: 1675 - RNA, 17 nt, Artificial Sequence
  Sythetic
accaacuuuaaauguag

SEQ ID NO: 1676 - RNA, 17 nt, Artificial Sequence
  Sythetic
uaacagauucuguguag

SEQ ID NO: 1677 - RNA, 17 nt, Artificial Sequence
  Sythetic
gggagaguuucuuguag

SEQ ID NO: 1678 - RNA, 17 nt, Artificial Sequence
  Sythetic
gugggauaggggauacg

SEQ ID NO: 1679 - RNA, 17 nt, Artificial Sequence
  Sythetic
gcuguuucuuuugaagg

SEQ ID NO: 1680 - RNA, 17 nt, Artificial Sequence
  Sythetic
aacuuuaaauguagagg

SEQ ID NO: 1681 - RNA, 17 nt, Artificial Sequence
  Sythetic
uuucuuuugaaggaggg

SEQ ID NO: 1682 - RNA, 17 nt, Artificial Sequence
  Sythetic
cuguguggggguugggg

SEQ ID NO: 1683 - RNA, 17 nt, Artificial Sequence
  Sythetic
agaacaauaauauuggg

SEQ ID NO: 1684 - RNA, 17 nt, Artificial Sequence
  Sythetic
ggugagcaucugugugg

SEQ ID NO: 1685 - RNA, 17 nt, Artificial Sequence
  Sythetic
uuucuuuuacuaaaaug

SEQ ID NO: 1686 - RNA, 17 nt, Artificial Sequence
  Sythetic
gguggugagcaucugug

SEQ ID NO: 1687 - RNA, 17 nt, Artificial Sequence
  Sythetic
uggugagcaucugugug

SEQ ID NO: 1688 - RNA, 17 nt, Artificial Sequence
  Sythetic
caucuguguggggguug

SEQ ID NO: 1689 - RNA, 17 nt, Artificial Sequence
  Sythetic
ggggguuggggugggau

SEQ ID NO: 1690 - RNA, 17 nt, Artificial Sequence
  Sythetic
acagagaacaauaauau

SEQ ID NO: 1691 - RNA, 17 nt, Artificial Sequence
  Sythetic
ugccaaaugucuucuau

SEQ ID NO: 1692 - RNA, 17 nt, Artificial Sequence
  Sythetic
auaauuguaugagcacu

SEQ ID NO: 1693 - RNA, 17 nt, Artificial Sequence
  Sythetic
guaaccucucagcugcu

SEQ ID NO: 1694 - RNA, 17 nt, Artificial Sequence
  Sythetic
acaaaucauuugcuucu

SEQ ID NO: 1695 - RNA, 17 nt, Artificial Sequence
  Sythetic
auagacaguauaaaagu

SEQ ID NO: 1696 - RNA, 17 nt, Artificial Sequence
  Sythetic
cccucuacauuuaaagu

SEQ ID NO: 1697 - RNA, 17 nt, Artificial Sequence
  Sythetic
uuaaaguugguuuaagu

SEQ ID NO: 1698 - RNA, 17 nt, Artificial Sequence
  Sythetic
aacagauucuguguagu

SEQ ID NO: 1699 - RNA, 17 nt, Artificial Sequence
  Sythetic
agcaucugugugggggu

SEQ ID NO: 1700 - RNA, 17 nt, Artificial Sequence
  Sythetic
uguguggggguuggggu

SEQ ID NO: 1701 - RNA, 17 nt, Artificial Sequence
  Sythetic
uucuuuuacuaaaaugu

SEQ ID NO: 1702 - RNA, 17 nt, Artificial Sequence
  Sythetic
guggugagcaucugugu

SEQ ID NO: 1703 - RNA, 17 nt, Artificial Sequence
  Sythetic
cggggagaguuucuugu

SEQ ID NO: 1704 - RNA, 17 nt, Artificial Sequence
  Sythetic
aacccauagaagacauu

SEQ ID NO: 1705 - RNA, 17 nt, Artificial Sequence
  Sythetic
cagagaacaauaauauu

SEQ ID NO: 1706 - RNA, 17 nt, Artificial Sequence
  Sythetic
aggaaagggucacaguu

SEQ ID NO: 1707 - RNA, 17 nt, Artificial Sequence
  Sythetic
gcaucuguguggggguu

SEQ ID NO: 1708 - RNA, 20 nt, Artificial Sequence
  Sythetic
acggggagaguggagaaaaa

SEQ ID NO: 1709 - RNA, 20 nt, Artificial Sequence
  Sythetic
uacggggagaguggagaaaa

SEQ ID NO: 1710 - RNA, 20 nt, Artificial Sequence
  Sythetic
uaaucuuuaagauaaggaaa

SEQ ID NO: 1711 - RNA, 20 nt, Artificial Sequence
  Sythetic
uuuucaacaguaaggcuaaa

SEQ ID NO: 1712 - RNA, 20 nt, Artificial Sequence
  Sythetic
ugugagugaaagacuuuaaa

SEQ ID NO: 1713 - RNA, 20 nt, Artificial Sequence
  Sythetic
auaaucuuuaagauaaggaa

SEQ ID NO: 1714 - RNA, 20 nt, Artificial Sequence
  Sythetic
gagaguuucuuguaggggaa

SEQ ID NO: 1715 - RNA, 20 nt, Artificial Sequence
  Sythetic
uuagaaaauauaaagaauaa

SEQ ID NO: 1716 - RNA, 20 nt, Artificial Sequence
  Sythetic
uugugagugaaagacuuuaa

SEQ ID NO: 1717 - RNA, 20 nt, Artificial Sequence
  Sythetic
guggagaaaaaggggacaca

SEQ ID NO: 1718 - RNA, 20 nt, Artificial Sequence
  Sythetic
augauuuguacaagaucaca

SEQ ID NO: 1719 - RNA, 20 nt, Artificial Sequence
  Sythetic
aguuuggaaugaguuucaga

SEQ ID NO: 1720 - RNA, 20 nt, Artificial Sequence
  Sythetic
agaaggcaucucacuggaga

SEQ ID NO: 1721 - RNA, 20 nt, Artificial Sequence
  Sythetic
aaaccaacuuuaaauguaga

SEQ ID NO: 1722 - RNA, 20 nt, Artificial Sequence
  Sythetic
augcuguuucuuuugaagga

SEQ ID NO: 1723 - RNA, 20 nt, Artificial Sequence
  Sythetic
uaaaucauuaaguguauuga

SEQ ID NO: 1724 - RNA, 20 nt, Artificial Sequence
  Sythetic
ggaaaugcuguuucuuuuga

SEQ ID NO: 1725 - RNA, 20 nt, Artificial Sequence
  Sythetic
aaaauauaaucuuuaagaua

SEQ ID NO: 1726 - RNA, 20 nt, Artificial Sequence
  Sythetic
uuggggugggauaggggaua

SEQ ID NO: 1727 - RNA, 20 nt, Artificial Sequence
  Sythetic
guggggguuggggugggaua

SEQ ID NO: 1728 - RNA, 20 nt, Artificial Sequence
  Sythetic
ugaaaucuuaucuucugcua

SEQ ID NO: 1729 - RNA, 20 nt, Artificial Sequence
  Sythetic
uguuugccaaaugucuucua

SEQ ID NO: 1730 - RNA, 20 nt, Artificial Sequence
  Sythetic
cacagggcuuuucaacagua

SEQ ID NO: 1731 - RNA, 20 nt, Artificial Sequence
  Sythetic
aaucuuucuuuugagaggua

SEQ ID NO: 1732 - RNA, 20 nt, Artificial Sequence
  Sythetic
accggggagaguuucuugua

SEQ ID NO: 1733 - RNA, 20 nt, Artificial Sequence
  Sythetic
aguggagaaaaaggggacac

SEQ ID NO: 1734 - RNA, 20 nt, Artificial Sequence
  Sythetic
aaugauuuguacaagaucac

SEQ ID NO: 1735 - RNA, 20 nt, Artificial Sequence
  Sythetic
auauucagaaggcaucucac

SEQ ID NO: 1736 - RNA, 20 nt, Artificial Sequence
  Sythetic
uauuuacgggcuuuucucac

SEQ ID NO: 1737 - RNA, 20 nt, Artificial Sequence
  Sythetic
uggggugggauaggggauac

SEQ ID NO: 1738 - RNA, 20 nt, Artificial Sequence
  Sythetic
gcagcugagagguuacuuac

SEQ ID NO: 1739 - RNA, 20 nt, Artificial Sequence
  Sythetic
agaugaguaaaagacuuuac

SEQ ID NO: 1740 - RNA, 20 nt, Artificial Sequence
  Sythetic
cagcugagagguuacuuacc

SEQ ID NO: 1741 - RNA, 20 nt, Artificial Sequence
  Sythetic
uuaaauguagagggggaucc

SEQ ID NO: 1742 - RNA, 20 nt, Artificial Sequence
  Sythetic
acaggguuaaugugaagucc

SEQ ID NO: 1743 - RNA, 20 nt, Artificial Sequence
  Sythetic
auugauuugcacagcucauc

SEQ ID NO: 1744 - RNA, 20 nt, Artificial Sequence
  Sythetic
uaagcuagagaauagaucuc

SEQ ID NO: 1745 - RNA, 20 nt, Artificial Sequence
  Sythetic
aacggaugucucagcucuuc

SEQ ID NO: 1746 - RNA, 20 nt, Artificial Sequence
  Sythetic
cggggagaguggagaaaaag

SEQ ID NO: 1747 - RNA, 20 nt, Artificial Sequence
  Sythetic
aaccaacuuuaaauguagag

SEQ ID NO: 1748 - RNA, 20 nt, Artificial Sequence
  Sythetic
cagaaggcaucucacuggag

SEQ ID NO: 1749 - RNA, 20 nt, Artificial Sequence
  Sythetic
uaacaggccaagcagcugag

SEQ ID NO: 1750 - RNA, 20 nt, Artificial Sequence
  Sythetic
cugcaaaucuuucuuuugag

SEQ ID NO: 1751 - RNA, 20 nt, Artificial Sequence
  Sythetic
uggggguuggggugggauag

SEQ ID NO: 1752 - RNA, 20 nt, Artificial Sequence
  Sythetic
uaaaccaacuuuaaauguag

SEQ ID NO: 1753 - RNA, 20 nt, Artificial Sequence
  Sythetic
uucuaacagauucuguguag

SEQ ID NO: 1754 - RNA, 20 nt, Artificial Sequence
  Sythetic
ggggugggauaggggauacg

SEQ ID NO: 1755 - RNA, 20 nt, Artificial Sequence
  Sythetic
aaugcuguuucuuuugaagg

SEQ ID NO: 1756 - RNA, 20 nt, Artificial Sequence
  Sythetic
accaacuuuaaauguagagg

SEQ ID NO: 1757 - RNA, 20 nt, Artificial Sequence
  Sythetic
cuguuucuuuugaaggaggg

SEQ ID NO: 1758 - RNA, 20 nt, Artificial Sequence
  Sythetic
caucuguguggggguugggg

SEQ ID NO: 1759 - RNA, 20 nt, Artificial Sequence
  Sythetic
cagagaacaauaauauuggg

SEQ ID NO: 1760 - RNA, 20 nt, Artificial Sequence
  Sythetic
gguggugagcaucugugugg

SEQ ID NO: 1761 - RNA, 20 nt, Artificial Sequence
  Sythetic
uaauuucuuuuacuaaaaug

SEQ ID NO: 1762 - RNA, 20 nt, Artificial Sequence
  Sythetic
uuggguggugagcaucugug

SEQ ID NO: 1763 - RNA, 20 nt, Artificial Sequence
  Sythetic
ggguggugagcaucugugug

SEQ ID NO: 1764 - RNA, 20 nt, Artificial Sequence
  Sythetic
gagcaucuguguggggguug

SEQ ID NO: 1765 - RNA, 20 nt, Artificial Sequence
  Sythetic
uguggggguuggggugggau

SEQ ID NO: 1766 - RNA, 20 nt, Artificial Sequence
  Sythetic
uuuacagagaacaauaauau

SEQ ID NO: 1767 - RNA, 20 nt, Artificial Sequence
  Sythetic
guuugccaaaugucuucuau

SEQ ID NO: 1768 - RNA, 20 nt, Artificial Sequence
  Sythetic
uaaguaaccucucagcugcu

SEQ ID NO: 1769 - RNA, 20 nt, Artificial Sequence
  Sythetic
uguacaaaucauuugcuucu

SEQ ID NO: 1770 - RNA, 20 nt, Artificial Sequence
  Sythetic
cauauagacaguauaaaagu

SEQ ID NO: 1771 - RNA, 20 nt, Artificial Sequence
  Sythetic
cauuuaaaguugguuuaagu

SEQ ID NO: 1772 - RNA, 20 nt, Artificial Sequence
  Sythetic
ucuaacagauucuguguagu

SEQ ID NO: 1773 - RNA, 20 nt, Artificial Sequence
  Sythetic
gugagcaucugugugggggu

SEQ ID NO: 1774 - RNA, 20 nt, Artificial Sequence
  Sythetic
aucuguguggggguuggggu

SEQ ID NO: 1775 - RNA, 20 nt, Artificial Sequence
  Sythetic
aauuucuuuuacuaaaaugu

SEQ ID NO: 1776 - RNA, 20 nt, Artificial Sequence
  Sythetic
uggguggugagcaucugugu

SEQ ID NO: 1777 - RNA, 20 nt, Artificial Sequence
  Sythetic
uaccggggagaguuucuugu

SEQ ID NO: 1778 - RNA, 20 nt, Artificial Sequence
  Sythetic
ggaaacccauagaagacauu

SEQ ID NO: 1779 - RNA, 20 nt, Artificial Sequence
  Sythetic
uuacagagaacaauaauauu

SEQ ID NO: 1780 - RNA, 20 nt, Artificial Sequence
  Sythetic
auaaggaaagggucacaguu

SEQ ID NO: 1781 - RNA, 20 nt, Artificial Sequence
  Sythetic
ugagcaucuguguggggguu

SEQ ID NO: 1782 - RNA, 17 nt, Artificial Sequence
  Sythetic
agagggaagccuaaaaa

SEQ ID NO: 1783 - RNA, 17 nt, Artificial Sequence
  Sythetic
augcuuacugguuugaa

SEQ ID NO: 1784 - RNA, 17 nt, Artificial Sequence
  Sythetic
ggaguuugagacucaca

SEQ ID NO: 1785 - RNA, 17 nt, Artificial Sequence
  Sythetic
uuuuuauucuagagcca

SEQ ID NO: 1786 - RNA, 17 nt, Artificial Sequence
  Sythetic
gccuagucuaaggugca

SEQ ID NO: 1787 - RNA, 17 nt, Artificial Sequence
  Sythetic
uuuuaacuaugggcuca

SEQ ID NO: 1788 - RNA, 17 nt, Artificial Sequence
  Sythetic
uucuagagccaagguca

SEQ ID NO: 1789 - RNA, 17 nt, Artificial Sequence
  Sythetic
cuaauauaucaguuuca

SEQ ID NO: 1790 - RNA, 17 nt, Artificial Sequence
  Sythetic
cuggguccagaaaaaga

SEQ ID NO: 1791 - RNA, 17 nt, Artificial Sequence
  Sythetic
uuuuccuccagacaaga

SEQ ID NO: 1792 - RNA, 17 nt, Artificial Sequence
  Sythetic
gcuugugaucucuaaga

SEQ ID NO: 1793 - RNA, 17 nt, Artificial Sequence
  Sythetic
ggucacggaagcccaga

SEQ ID NO: 1794 - RNA, 17 nt, Artificial Sequence
  Sythetic
aaugcuuacugguuuga

SEQ ID NO: 1795 - RNA, 17 nt, Artificial Sequence
  Sythetic
cacaugacauaaguaua

SEQ ID NO: 1796 - RNA, 17 nt, Artificial Sequence
  Sythetic
cuaaagaguuuuaacua

SEQ ID NO: 1797 - RNA, 17 nt, Artificial Sequence
  Sythetic
cucagcugccuagucua

SEQ ID NO: 1798 - RNA, 17 nt, Artificial Sequence
  Sythetic
aaaaaugagcuuuucua

SEQ ID NO: 1799 - RNA, 17 nt, Artificial Sequence
  Sythetic
uaguauauaauucuuua

SEQ ID NO: 1800 - RNA, 17 nt, Artificial Sequence
  Sythetic
ucacgggugagcuaaac

SEQ ID NO: 1801 - RNA, 17 nt, Artificial Sequence
  Sythetic
aaaacucuuuagacaac

SEQ ID NO: 1802 - RNA, 17 nt, Artificial Sequence
  Sythetic
gggaguuugagacucac

SEQ ID NO: 1803 - RNA, 17 nt, Artificial Sequence
  Sythetic
uuuaacuaugggcucac

SEQ ID NO: 1804 - RNA, 17 nt, Artificial Sequence
  Sythetic
uccucauaaaugcuuac

SEQ ID NO: 1805 - RNA, 17 nt, Artificial Sequence
  Sythetic
caucuuuuucuggaccc

SEQ ID NO: 1806 - RNA, 17 nt, Artificial Sequence
  Sythetic
ucaucuaugaccuuccc

SEQ ID NO: 1807 - RNA, 17 nt, Artificial Sequence
  Sythetic
aauccccacuaagaucc

SEQ ID NO: 1808 - RNA, 17 nt, Artificial Sequence
  Sythetic
agacuaggcaagacagc

SEQ ID NO: 1809 - RNA, 17 nt, Artificial Sequence
  Sythetic
ccagauacauagguggc

SEQ ID NO: 1810 - RNA, 17 nt, Artificial Sequence
  Sythetic
ugccuagucuaaggugc

SEQ ID NO: 1811 - RNA, 17 nt, Artificial Sequence
  Sythetic
uucagauagauuauauc

SEQ ID NO: 1812 - RNA, 17 nt, Artificial Sequence
  Sythetic
ccugccaccuauguauc

SEQ ID NO: 1813 - RNA, 17 nt, Artificial Sequence
  Sythetic
agccacaagaugcccuc

SEQ ID NO: 1814 - RNA, 17 nt, Artificial Sequence
  Sythetic
agggcaucuuguggcuc

SEQ ID NO: 1815 - RNA, 17 nt, Artificial Sequence
  Sythetic
gaaguugugucuaaguc

SEQ ID NO: 1816 - RNA, 17 nt, Artificial Sequence
  Sythetic
uaggcuucccucuuguc

SEQ ID NO: 1817 - RNA, 17 nt, Artificial Sequence
  Sythetic
augaaugucaugcauuc

SEQ ID NO: 1818 - RNA, 17 nt, Artificial Sequence
  Sythetic
aguauauggucaaguuc

SEQ ID NO: 1819 - RNA, 17 nt, Artificial Sequence
  Sythetic
gguuucccaucuuuuuc

SEQ ID NO: 1820 - RNA, 17 nt, Artificial Sequence
  Sythetic
uuuuuccuccagacaag

SEQ ID NO: 1821 - RNA, 17 nt, Artificial Sequence
  Sythetic
ugcccccaauccuacag

SEQ ID NO: 1822 - RNA, 17 nt, Artificial Sequence
  Sythetic
aggucacggaagcccag

SEQ ID NO: 1823 - RNA, 17 nt, Artificial Sequence
  Sythetic
aaaaugagcuuuucuag

SEQ ID NO: 1824 - RNA, 17 nt, Artificial Sequence
  Sythetic
ugaaacugauauauuag

SEQ ID NO: 1825 - RNA, 17 nt, Artificial Sequence
  Sythetic
uggacccaggaucuuag

SEQ ID NO: 1826 - RNA, 17 nt, Artificial Sequence
  Sythetic
uaugccagauacauagg

SEQ ID NO: 1827 - RNA, 17 nt, Artificial Sequence
  Sythetic
gcuucccucuugucugg

SEQ ID NO: 1828 - RNA, 17 nt, Artificial Sequence
  Sythetic
augacauucaucugugg

SEQ ID NO: 1829 - RNA, 17 nt, Artificial Sequence
  Sythetic
ugccucuguaggauugg

SEQ ID NO: 1830 - RNA, 17 nt, Artificial Sequence
  Sythetic
auaucaagcucucuugg

SEQ ID NO: 1831 - RNA, 17 nt, Artificial Sequence
  Sythetic
cauauacuuaugucaug

SEQ ID NO: 1832 - RNA, 17 nt, Artificial Sequence
  Sythetic
accaguaagcauuuaug

SEQ ID NO: 1833 - RNA, 17 nt, Artificial Sequence
  Sythetic
ugcaugacauucaucug

SEQ ID NO: 1834 - RNA, 17 nt, Artificial Sequence
  Sythetic
gacccaggaucuuagug

SEQ ID NO: 1835 - RNA, 17 nt, Artificial Sequence
  Sythetic
acuucacagaaaaugug

SEQ ID NO: 1836 - RNA, 17 nt, Artificial Sequence
  Sythetic
augacaacucuuaauug

SEQ ID NO: 1837 - RNA, 17 nt, Artificial Sequence
  Sythetic
cugccucuguaggauug

SEQ ID NO: 1838 - RNA, 17 nt, Artificial Sequence
  Sythetic
gcccagagggcaucuug

SEQ ID NO: 1839 - RNA, 17 nt, Artificial Sequence
  Sythetic
uuagacacaacuucuug

SEQ ID NO: 1840 - RNA, 17 nt, Artificial Sequence
  Sythetic
cguaauuuugcuguuug

SEQ ID NO: 1841 - RNA, 17 nt, Artificial Sequence
  Sythetic
ugugaggauuuuacaau

SEQ ID NO: 1842 - RNA, 17 nt, Artificial Sequence
  Sythetic
cacuaugccagauacau

SEQ ID NO: 1843 - RNA, 17 nt, Artificial Sequence
  Sythetic
uggguccagaaaaagau

SEQ ID NO: 1844 - RNA, 17 nt, Artificial Sequence
  Sythetic
uaaagaguuuuaacuau

SEQ ID NO: 1845 - RNA, 17 nt, Artificial Sequence
  Sythetic
cugaacuuaaauagacu

SEQ ID NO: 1846 - RNA, 17 nt, Artificial Sequence
  Sythetic
ucccugcaccuuagacu

SEQ ID NO: 1847 - RNA, 17 nt, Artificial Sequence
  Sythetic
cugggcuuccgugaccu

SEQ ID NO: 1848 - RNA, 17 nt, Artificial Sequence
  Sythetic
caucuaugaccuucccu

SEQ ID NO: 1849 - RNA, 17 nt, Artificial Sequence
  Sythetic
auccccacuaagauccu

SEQ ID NO: 1850 - RNA, 17 nt, Artificial Sequence
  Sythetic
gagggcaucuuguggcu

SEQ ID NO: 1851 - RNA, 17 nt, Artificial Sequence
  Sythetic
gccacaagaugcccucu

SEQ ID NO: 1852 - RNA, 17 nt, Artificial Sequence
  Sythetic
gucauaucaagcucucu

SEQ ID NO: 1853 - RNA, 17 nt, Artificial Sequence
  Sythetic
ugaaugucaugcauucu

SEQ ID NO: 1854 - RNA, 17 nt, Artificial Sequence
  Sythetic
uuuauuauauuauuucu

SEQ ID NO: 1855 - RNA, 17 nt, Artificial Sequence
  Sythetic
uaaaaaugagcuuuucu

SEQ ID NO: 1856 - RNA, 17 nt, Artificial Sequence
  Sythetic
ggacccaggaucuuagu

SEQ ID NO: 1857 - RNA, 17 nt, Artificial Sequence
  Sythetic
caagcucucuuggcggu

SEQ ID NO: 1858 - RNA, 17 nt, Artificial Sequence
  Sythetic
uagacacaacuucuugu

SEQ ID NO: 1859 - RNA, 17 nt, Artificial Sequence
  Sythetic
ucugccucuguaggauu

SEQ ID NO: 1860 - RNA, 17 nt, Artificial Sequence
  Sythetic
uagaggaaaauuuuauu

SEQ ID NO: 1861 - RNA, 17 nt, Artificial Sequence
  Sythetic
ucuagaauaaaaagcuu

SEQ ID NO: 1862 - RNA, 17 nt, Artificial Sequence
  Sythetic
uuauuauauuauuucuu

SEQ ID NO: 1863 - RNA, 17 nt, Artificial Sequence
  Sythetic
cacguaauuuugcuguu

SEQ ID NO: 1864 - RNA, 17 nt, Artificial Sequence
  Sythetic
acguaauuuugcuguuu

SEQ ID NO: 1865 - RNA, 17 nt, Artificial Sequence
  Sythetic
uaauuuugaccauuuuu

SEQ ID NO: 1866 - RNA, 20 nt, Artificial Sequence
  Sythetic
acaagagggaagccuaaaaa

SEQ ID NO: 1867 - RNA, 20 nt, Artificial Sequence
  Sythetic
uaaaugcuuacugguuugaa

SEQ ID NO: 1868 - RNA, 20 nt, Artificial Sequence
  Sythetic
cagggaguuugagacucaca

SEQ ID NO: 1869 - RNA, 20 nt, Artificial Sequence
  Sythetic
agcuuuuuauucuagagcca

SEQ ID NO: 1870 - RNA, 20 nt, Artificial Sequence
  Sythetic
gcugccuagucuaaggugca

SEQ ID NO: 1871 - RNA, 20 nt, Artificial Sequence
  Sythetic
gaguuuuaacuaugggcuca

SEQ ID NO: 1872 - RNA, 20 nt, Artificial Sequence
  Sythetic
uuauucuagagccaagguca

SEQ ID NO: 1873 - RNA, 20 nt, Artificial Sequence
  Sythetic
ccucuaauauaucaguuuca

SEQ ID NO: 1874 - RNA, 20 nt, Artificial Sequence
  Sythetic
auccuggguccagaaaaaga

SEQ ID NO: 1875 - RNA, 20 nt, Artificial Sequence
  Sythetic
ucuuuuuccuccagacaaga

SEQ ID NO: 1876 - RNA, 20 nt, Artificial Sequence
  Sythetic
uuggcuugugaucucuaaga

SEQ ID NO: 1877 - RNA, 20 nt, Artificial Sequence
  Sythetic
caaggucacggaagcccaga

SEQ ID NO: 1878 - RNA, 20 nt, Artificial Sequence
  Sythetic
auaaaugcuuacugguuuga

SEQ ID NO: 1879 - RNA, 20 nt, Artificial Sequence
  Sythetic
uuccacaugacauaaguaua

SEQ ID NO: 1880 - RNA, 20 nt, Artificial Sequence
  Sythetic
ugucuaaagaguuuuaacua

SEQ ID NO: 1881 - RNA, 20 nt, Artificial Sequence
  Sythetic
ucucucagcugccuagucua

SEQ ID NO: 1882 - RNA, 20 nt, Artificial Sequence
  Sythetic
auuaaaaaugagcuuuucua

SEQ ID NO: 1883 - RNA, 20 nt, Artificial Sequence
  Sythetic
aguuaguauauaauucuuua

SEQ ID NO: 1884 - RNA, 20 nt, Artificial Sequence
  Sythetic
ggcucacgggugagcuaaac

SEQ ID NO: 1885 - RNA, 20 nt, Artificial Sequence
  Sythetic
guuaaaacucuuuagacaac

SEQ ID NO: 1886 - RNA, 20 nt, Artificial Sequence
  Sythetic
gcagggaguuugagacucac

SEQ ID NO: 1887 - RNA, 20 nt, Artificial Sequence
  Sythetic
aguuuuaacuaugggcucac

SEQ ID NO: 1888 - RNA, 20 nt, Artificial Sequence
  Sythetic
gaguccucauaaaugcuuac

SEQ ID NO: 1889 - RNA, 20 nt, Artificial Sequence
  Sythetic
ucccaucuuuuucuggaccc

SEQ ID NO: 1890 - RNA, 20 nt, Artificial Sequence
  Sythetic
uugucaucuaugaccuuccc

SEQ ID NO: 1891 - RNA, 20 nt, Artificial Sequence
  Sythetic
gaaaauccccacuaagaucc

SEQ ID NO: 1892 - RNA, 20 nt, Artificial Sequence
  Sythetic
aauagacuaggcaagacagc

SEQ ID NO: 1893 - RNA, 20 nt, Artificial Sequence
  Sythetic
augccagauacauagguggc

SEQ ID NO: 1894 - RNA, 20 nt, Artificial Sequence
  Sythetic
agcugccuagucuaaggugc

SEQ ID NO: 1895 - RNA, 20 nt, Artificial Sequence
  Sythetic
agcuucagauagauuauauc

SEQ ID NO: 1896 - RNA, 20 nt, Artificial Sequence
  Sythetic
aauccugccaccuauguauc

SEQ ID NO: 1897 - RNA, 20 nt, Artificial Sequence
  Sythetic
ccgagccacaagaugcccuc

SEQ ID NO: 1898 - RNA, 20 nt, Artificial Sequence
  Sythetic
cagagggcaucuuguggcuc

SEQ ID NO: 1899 - RNA, 20 nt, Artificial Sequence
  Sythetic
caagaaguugugucuaaguc

SEQ ID NO: 1900 - RNA, 20 nt, Artificial Sequence
  Sythetic
uuuuaggcuucccucuuguc

SEQ ID NO: 1901 - RNA, 20 nt, Artificial Sequence
  Sythetic
cagaugaaugucaugcauuc

SEQ ID NO: 1902 - RNA, 20 nt, Artificial Sequence
  Sythetic
auaaguauauggucaaguuc

SEQ ID NO: 1903 - RNA, 20 nt, Artificial Sequence
  Sythetic
acagguuucccaucuuuuuc

SEQ ID NO: 1904 - RNA, 20 nt, Artificial Sequence
  Sythetic
uucuuuuuccuccagacaag

SEQ ID NO: 1905 - RNA, 20 nt, Artificial Sequence
  Sythetic
acgugcccccaauccuacag

SEQ ID NO: 1906 - RNA, 20 nt, Artificial Sequence
  Sythetic
ccaaggucacggaagcccag

SEQ ID NO: 1907 - RNA, 20 nt, Artificial Sequence
  Sythetic
uuaaaaaugagcuuuucuag

SEQ ID NO: 1908 - RNA, 20 nt, Artificial Sequence
  Sythetic
ccaugaaacugauauauuag

SEQ ID NO: 1909 - RNA, 20 nt, Artificial Sequence
  Sythetic
uucuggacccaggaucuuag

SEQ ID NO: 1910 - RNA, 20 nt, Artificial Sequence
  Sythetic
cacuaugccagauacauagg

SEQ ID NO: 1911 - RNA, 20 nt, Artificial Sequence
  Sythetic
uaggcuucccucuugucugg

SEQ ID NO: 1912 - RNA, 20 nt, Artificial Sequence
  Sythetic
ugcaugacauucaucugugg

SEQ ID NO: 1913 - RNA, 20 nt, Artificial Sequence
  Sythetic
gucauaucaagcucucuugg

SEQ ID NO: 1914 - RNA, 20 nt, Artificial Sequence
  Sythetic
gaccauauacuuaugucaug

SEQ ID NO: 1915 - RNA, 20 nt, Artificial Sequence
  Sythetic
caaaccaguaagcauuuaug

SEQ ID NO: 1916 - RNA, 20 nt, Artificial Sequence
  Sythetic
gaaugcaugacauucaucug

SEQ ID NO: 1917 - RNA, 20 nt, Artificial Sequence
  Sythetic
cuggacccaggaucuuagug

SEQ ID NO: 1918 - RNA, 20 nt, Artificial Sequence
  Sythetic
caaacuucacagaaaaugug

SEQ ID NO: 1919 - RNA, 20 nt, Artificial Sequence
  Sythetic
uguaugacaacucuuaauug

SEQ ID NO: 1920 - RNA, 20 nt, Artificial Sequence
  Sythetic
gaagcccagagggcaucuug

SEQ ID NO: 1921 - RNA, 20 nt, Artificial Sequence
  Sythetic
gacuuagacacaacuucuug

SEQ ID NO: 1922 - RNA, 20 nt, Artificial Sequence
  Sythetic
gcacguaauuuugcuguuug

SEQ ID NO: 1923 - RNA, 20 nt, Artificial Sequence
  Sythetic
aaaugugaggauuuuacaau

SEQ ID NO: 1924 - RNA, 20 nt, Artificial Sequence
  Sythetic
ucacacuaugccagauacau

SEQ ID NO: 1925 - RNA, 20 nt, Artificial Sequence
  Sythetic
uccuggguccagaaaaagau

SEQ ID NO: 1926 - RNA, 20 nt, Artificial Sequence
  Sythetic
gucuaaagaguuuuaacuau

SEQ ID NO: 1927 - RNA, 20 nt, Artificial Sequence
  Sythetic
cagcugaacuuaaauagacu

SEQ ID NO: 1928 - RNA, 20 nt, Artificial Sequence
  Sythetic
aacucccugcaccuuagacu

SEQ ID NO: 1929 - RNA, 20 nt, Artificial Sequence
  Sythetic
ccucugggcuuccgugaccu

SEQ ID NO: 1930 - RNA, 20 nt, Artificial Sequence
  Sythetic
ugucaucuaugaccuucccu

SEQ ID NO: 1931 - RNA, 20 nt, Artificial Sequence
  Sythetic
aaaauccccacuaagauccu

SEQ ID NO: 1932 - RNA, 20 nt, Artificial Sequence
  Sythetic
ccagagggcaucuuguggcu

SEQ ID NO: 1933 - RNA, 20 nt, Artificial Sequence
  Sythetic
cgagccacaagaugcccucu

SEQ ID NO: 1934 - RNA, 20 nt, Artificial Sequence
  Sythetic
acagucauaucaagcucucu

SEQ ID NO: 1935 - RNA, 20 nt, Artificial Sequence
  Sythetic
agaugaaugucaugcauucu

SEQ ID NO: 1936 - RNA, 20 nt, Artificial Sequence
  Sythetic
uuuuuuauuauauuauuucu

SEQ ID NO: 1937 - RNA, 20 nt, Artificial Sequence
  Sythetic
aauuaaaaaugagcuuuucu

SEQ ID NO: 1938 - RNA, 20 nt, Artificial Sequence
  Sythetic
ucuggacccaggaucuuagu

SEQ ID NO: 1939 - RNA, 20 nt, Artificial Sequence
  Sythetic
uaucaagcucucuuggcggu

SEQ ID NO: 1940 - RNA, 20 nt, Artificial Sequence
  Sythetic
acuuagacacaacuucuugu

SEQ ID NO: 1941 - RNA, 20 nt, Artificial Sequence
  Sythetic
uauuagaggaaaauuuuauu

SEQ ID NO: 1942 - RNA, 20 nt, Artificial Sequence
  Sythetic
ggcucuagaauaaaaagcuu

SEQ ID NO: 1943 - RNA, 20 nt, Artificial Sequence
  Sythetic
uuuuuauuauauuauuucuu

SEQ ID NO: 1944 - RNA, 20 nt, Artificial Sequence
  Sythetic
gggcacguaauuuugcuguu

SEQ ID NO: 1945 - RNA, 20 nt, Artificial Sequence
  Sythetic
ggcacguaauuuugcuguuu

SEQ ID NO: 1946 - RNA, 20 nt, Artificial Sequence
  Sythetic
uauuaauuuugaccauuuuu

SEQ ID NO: 1947 - RNA, 18 nt, Artificial Sequence
  Sythetic
aaguguauugaaggcgaa

SEQ ID NO: 1948 - RNA, 19 nt, Artificial Sequence
  Sythetic
uaaguguauugaaggcgaa

SEQ ID NO: 1949 - RNA, 20 nt, Artificial Sequence
  Sythetic
uuaaguguauugaaggcgaa

SEQ ID NO: 1950 - RNA, 21 nt, Artificial Sequence
  Sythetic
auuaaguguauugaaggcgaa

SEQ ID NO: 1951 - RNA, 22 nt, Artificial Sequence
  Sythetic
cauuaaguguauugaaggcgaa

SEQ ID NO: 1952 - RNA, 23 nt, Artificial Sequence
  Sythetic
ucauuaaguguauugaaggcgaa

SEQ ID NO: 1953 - RNA, 24 nt, Artificial Sequence
  Sythetic
aucauuaaguguauugaaggcgaa

SEQ ID NO: 1954 - RNA, 21 nt, Artificial Sequence
  Sythetic
uucucugcucaucccacuaca

SEQ ID NO: 1955 - RNA, 22 nt, Artificial Sequence
  Sythetic
guucucugcucaucccacuaca

SEQ ID NO: 1956 - RNA, 23 nt, Artificial Sequence
  Sythetic
uguucucugcucaucccacuaca

SEQ ID NO: 1957 - RNA, 24 nt, Artificial Sequence
  Sythetic
uuguucucugcucaucccacuaca

SEQ ID NO: 1958 - RNA, 18 nt, Artificial Sequence
  Sythetic
auuuacgggcuuuucuca

SEQ ID NO: 1959 - RNA, 19 nt, Artificial Sequence
  Sythetic
uauuuacgggcuuuucuca

SEQ ID NO: 1960 - RNA, 20 nt, Artificial Sequence
  Sythetic
uuauuuacgggcuuuucuca

SEQ ID NO: 1961 - RNA, 21 nt, Artificial Sequence
  Sythetic
uuuauuuacgggcuuuucuca

SEQ ID NO: 1962 - RNA, 22 nt, Artificial Sequence
  Sythetic
guuuauuuacgggcuuuucuca

SEQ ID NO: 1963 - RNA, 23 nt, Artificial Sequence
  Sythetic
gguuuauuuacgggcuuuucuca

SEQ ID NO: 1964 - RNA, 24 nt, Artificial Sequence
  Sythetic
agguuuauuuacgggcuuuucuca

SEQ ID NO: 1965 - RNA, 21 nt, Artificial Sequence
  Sythetic
gggagaguuucuuguagggga

SEQ ID NO: 1966 - RNA, 22 nt, Artificial Sequence
  Sythetic
ggggagaguuucuuguagggga

SEQ ID NO: 1967 - RNA, 23 nt, Artificial Sequence
  Sythetic
cggggagaguuucuuguagggga

SEQ ID NO: 1968 - RNA, 24 nt, Artificial Sequence
  Sythetic
ccggggagaguuucuuguagggga

SEQ ID NO: 1969 - RNA, 21 nt, Artificial Sequence
  Sythetic
uucagaaggcaucucacugga

SEQ ID NO: 1970 - RNA, 22 nt, Artificial Sequence
  Sythetic
auucagaaggcaucucacugga

SEQ ID NO: 1971 - RNA, 23 nt, Artificial Sequence
  Sythetic
uauucagaaggcaucucacugga

SEQ ID NO: 1972 - RNA, 24 nt, Artificial Sequence
  Sythetic
auauucagaaggcaucucacugga

SEQ ID NO: 1973 - RNA, 18 nt, Artificial Sequence
  Sythetic
ugagcuuaaaauaagcua

SEQ ID NO: 1974 - RNA, 19 nt, Artificial Sequence
  Sythetic
uugagcuuaaaauaagcua

SEQ ID NO: 1975 - RNA, 20 nt, Artificial Sequence
  Sythetic
guugagcuuaaaauaagcua

SEQ ID NO: 1976 - RNA, 21 nt, Artificial Sequence
  Sythetic
gaaaugcuguuucuuuugaag

SEQ ID NO: 1977 - RNA, 22 nt, Artificial Sequence
  Sythetic
ggaaaugcuguuucuuuugaag

SEQ ID NO: 1978 - RNA, 23 nt, Artificial Sequence
  Sythetic
aggaaaugcuguuucuuuugaag

SEQ ID NO: 1979 - RNA, 24 nt, Artificial Sequence
  Sythetic
uaggaaaugcuguuucuuuugaag

SEQ ID NO: 1980 - RNA, 21 nt, Artificial Sequence
  Sythetic
aaaccaacuuuaaauguagag

SEQ ID NO: 1981 - RNA, 22 nt, Artificial Sequence
  Sythetic
uaaaccaacuuuaaauguagag

SEQ ID NO: 1982 - RNA, 23 nt, Artificial Sequence
  Sythetic
uuaaaccaacuuuaaauguagag

SEQ ID NO: 1983 - RNA, 24 nt, Artificial Sequence
  Sythetic
cuuaaaccaacuuuaaauguagag

SEQ ID NO: 1984 - RNA, 21 nt, Artificial Sequence
  Sythetic
gcuguuucuuuugaaggaggg

SEQ ID NO: 1985 - RNA, 22 nt, Artificial Sequence
  Sythetic
ugcuguuucuuuugaaggaggg

SEQ ID NO: 1986 - RNA, 23 nt, Artificial Sequence
  Sythetic
augcuguuucuuuugaaggaggg

SEQ ID NO: 1987 - RNA, 24 nt, Artificial Sequence
  Sythetic
aaugcuguuucuuuugaaggaggg

SEQ ID NO: 1988 - RNA, 21 nt, Artificial Sequence
  Sythetic
gcugagagguuacuuaccggg

SEQ ID NO: 1989 - RNA, 22 nt, Artificial Sequence
  Sythetic
agcugagagguuacuuaccggg

SEQ ID NO: 1990 - RNA, 23 nt, Artificial Sequence
  Sythetic
cagcugagagguuacuuaccggg

SEQ ID NO: 1991 - RNA, 24 nt, Artificial Sequence
  Sythetic
gcagcugagagguuacuuaccggg

SEQ ID NO: 1992 - RNA, 21 nt, Artificial Sequence
  Sythetic
caaaucuuucuuuugagaggu

SEQ ID NO: 1993 - RNA, 22 nt, Artificial Sequence
  Sythetic
gcaaaucuuucuuuugagaggu

SEQ ID NO: 1994 - RNA, 23 nt, Artificial Sequence
  Sythetic
ugcaaaucuuucuuuugagaggu

SEQ ID NO: 1995 - RNA, 24 nt, Artificial Sequence
  Sythetic
cugcaaaucuuucuuuugagaggu

SEQ ID NO: 1996 - RNA, 21 nt, Artificial Sequence
  Sythetic
aggaaagggucacaguuugga

SEQ ID NO: 1997 - RNA, 22 nt, Artificial Sequence
  Sythetic
aaggaaagggucacaguuugga

SEQ ID NO: 1998 - RNA, 23 nt, Artificial Sequence
  Sythetic
uaaggaaagggucacaguuugga

SEQ ID NO: 1999 - RNA, 24 nt, Artificial Sequence
  Sythetic
auaaggaaagggucacaguuugga

SEQ ID NO: 2000 - RNA, 21 nt, Artificial Sequence
  Sythetic
acacaggguuaaugugaaguc

SEQ ID NO: 2001 - RNA, 22 nt, Artificial Sequence
  Sythetic
gacacaggguuaaugugaaguc

SEQ ID NO: 2002 - RNA, 23 nt, Artificial Sequence
  Sythetic
ggacacaggguuaaugugaaguc

SEQ ID NO: 2003 - RNA, 24 nt, Artificial Sequence
  Sythetic
gggacacaggguuaaugugaaguc

SEQ ID NO: 2004 - RNA, 21 nt, Artificial Sequence
  Sythetic
gccuguuaguuagcuucugag

SEQ ID NO: 2005 - RNA, 22 nt, Artificial Sequence
  Sythetic
ggccuguuaguuagcuucugag

SEQ ID NO: 2006 - RNA, 23 nt, Artificial Sequence
  Sythetic
uggccuguuaguuagcuucugag

SEQ ID NO: 2007 - RNA, 24 nt, Artificial Sequence
  Sythetic
uuggccuguuaguuagcuucugag

SEQ ID NO: 2008 - RNA, 18 nt, Artificial Sequence
  Sythetic
augugggcuuuugacuag

SEQ ID NO: 2009 - RNA, 19 nt, Artificial Sequence
  Sythetic
aaugugggcuuuugacuag

SEQ ID NO: 2010 - RNA, 20 nt, Artificial Sequence
  Sythetic
aaaugugggcuuuugacuag

SEQ ID NO: 2011 - RNA, 21 nt, Artificial Sequence
  Sythetic
aaaaugugggcuuuugacuag

SEQ ID NO: 2012 - RNA, 22 nt, Artificial Sequence
  Sythetic
uaaaaugugggcuuuugacuag

SEQ ID NO: 2013 - RNA, 23 nt, Artificial Sequence
  Sythetic
cuaaaaugugggcuuuugacuag

SEQ ID NO: 2014 - RNA, 24 nt, Artificial Sequence
  Sythetic
acuaaaaugugggcuuuugacuag

SEQ ID NO: 2015 - RNA, 21 nt, Artificial Sequence
  Sythetic
uuucuaacagauucuguguag

SEQ ID NO: 2016 - RNA, 22 nt, Artificial Sequence
  Sythetic
uuuucuaacagauucuguguag

SEQ ID NO: 2017 - RNA, 23 nt, Artificial Sequence
  Sythetic
auuuucuaacagauucuguguag

SEQ ID NO: 2018 - RNA, 24 nt, Artificial Sequence
  Sythetic
uauuuucuaacagauucuguguag

SEQ ID NO: 2019 - RNA, 21 nt, Artificial Sequence
  Sythetic
gggugggauaggggauacggg

SEQ ID NO: 2020 - RNA, 22 nt, Artificial Sequence
  Sythetic
ggggugggauaggggauacggg

SEQ ID NO: 2021 - RNA, 23 nt, Artificial Sequence
  Sythetic
uggggugggauaggggauacggg

SEQ ID NO: 2022 - RNA, 24 nt, Artificial Sequence
  Sythetic
uuggggugggauaggggauacggg

SEQ ID NO: 2023 - RNA, 18 nt, Artificial Sequence
  Sythetic
agcaacucuuaagauaau

SEQ ID NO: 2024 - RNA, 19 nt, Artificial Sequence
  Sythetic
uagcaacucuuaagauaau

SEQ ID NO: 2025 - RNA, 20 nt, Artificial Sequence
  Sythetic
auagcaacucuuaagauaau

SEQ ID NO: 2026 - RNA, 21 nt, Artificial Sequence
  Sythetic
aauagcaacucuuaagauaau

SEQ ID NO: 2027 - RNA, 22 nt, Artificial Sequence
  Sythetic
uaauagcaacucuuaagauaau

SEQ ID NO: 2028 - RNA, 23 nt, Artificial Sequence
  Sythetic
uuaauagcaacucuuaagauaau

SEQ ID NO: 2029 - RNA, 24 nt, Artificial Sequence
  Sythetic
auuaauagcaacucuuaagauaau

SEQ ID NO: 2030 - RNA, 21 nt, Artificial Sequence
  Sythetic
ggugagcaucugugugggggu

SEQ ID NO: 2031 - RNA, 22 nt, Artificial Sequence
  Sythetic
uggugagcaucugugugggggu

SEQ ID NO: 2032 - RNA, 23 nt, Artificial Sequence
  Sythetic
guggugagcaucugugugggggu

SEQ ID NO: 2033 - RNA, 24 nt, Artificial Sequence
  Sythetic
gguggugagcaucugugugggggu

SEQ ID NO: 2034 - RNA, 21 nt, Artificial Sequence
  Sythetic
uuggguggugagcaucugugu

SEQ ID NO: 2035 - RNA, 22 nt, Artificial Sequence
  Sythetic
auuggguggugagcaucugugu

SEQ ID NO: 2036 - RNA, 23 nt, Artificial Sequence
  Sythetic
uauuggguggugagcaucugugu

SEQ ID NO: 2037 - RNA, 24 nt, Artificial Sequence
  Sythetic
auauuggguggugagcaucugugu

SEQ ID NO: 2038 - RNA, 21 nt, Artificial Sequence
  Sythetic
ucaaagauacaaaacaugauu

SEQ ID NO: 2039 - RNA, 22 nt, Artificial Sequence
  Sythetic
aucaaagauacaaaacaugauu

SEQ ID NO: 2040 - RNA, 23 nt, Artificial Sequence
  Sythetic
caucaaagauacaaaacaugauu

SEQ ID NO: 2041 - RNA, 24 nt, Artificial Sequence
  Sythetic
acaucaaagauacaaaacaugauu

SEQ ID NO: 2042 - RNA, 21 nt, Artificial Sequence
  Sythetic
cccucuccagugagaugccuu

SEQ ID NO: 2043 - RNA, 22 nt, Artificial Sequence
  Sythetic
acccucuccagugagaugccuu

SEQ ID NO: 2044 - RNA, 23 nt, Artificial Sequence
  Sythetic
aacccucuccagugagaugccuu

SEQ ID NO: 2045 - RNA, 24 nt, Artificial Sequence
  Sythetic
aaacccucuccagugagaugccuu

SEQ ID NO: 2046 - RNA, 18 nt, Artificial Sequence
  Sythetic
ucugcucaucccacuaca

SEQ ID NO: 2047 - RNA, 19 nt, Artificial Sequence
  Sythetic
cucugcucaucccacuaca

SEQ ID NO: 2048 - RNA, 20 nt, Artificial Sequence
  Sythetic
ucucugcucaucccacuaca

SEQ ID NO: 2049 - RNA, 18 nt, Artificial Sequence
  Sythetic
agaguuucuuguagggga

SEQ ID NO: 2050 - RNA, 19 nt, Artificial Sequence
  Sythetic
gagaguuucuuguagggga

SEQ ID NO: 2051 - RNA, 20 nt, Artificial Sequence
  Sythetic
ggagaguuucuuguagggga

SEQ ID NO: 2052 - RNA, 18 nt, Artificial Sequence
  Sythetic
agaaggcaucucacugga

SEQ ID NO: 2053 - RNA, 19 nt, Artificial Sequence
  Sythetic
cagaaggcaucucacugga

SEQ ID NO: 2054 - RNA, 20 nt, Artificial Sequence
  Sythetic
ucagaaggcaucucacugga

SEQ ID NO: 2055 - RNA, 18 nt, Artificial Sequence
  Sythetic
uagaaaauauaaagaaua

SEQ ID NO: 2056 - RNA, 19 nt, Artificial Sequence
  Sythetic
uuagaaaauauaaagaaua

SEQ ID NO: 2057 - RNA, 20 nt, Artificial Sequence
  Sythetic
guuagaaaauauaaagaaua

SEQ ID NO: 2058 - RNA, 21 nt, Artificial Sequence
  Sythetic
uguuagaaaauauaaagaaua

SEQ ID NO: 2059 - RNA, 22 nt, Artificial Sequence
  Sythetic
cuguuagaaaauauaaagaaua

SEQ ID NO: 2060 - RNA, 23 nt, Artificial Sequence
  Sythetic
ucuguuagaaaauauaaagaaua

SEQ ID NO: 2061 - RNA, 24 nt, Artificial Sequence
  Sythetic
aucuguuagaaaauauaaagaaua

SEQ ID NO: 2062 - RNA, 18 nt, Artificial Sequence
  Sythetic
aaucuguuagaaaauaua

SEQ ID NO: 2063 - RNA, 19 nt, Artificial Sequence
  Sythetic
gaaucuguuagaaaauaua

SEQ ID NO: 2064 - RNA, 20 nt, Artificial Sequence
  Sythetic
agaaucuguuagaaaauaua

SEQ ID NO: 2065 - RNA, 21 nt, Artificial Sequence
  Sythetic
cagaaucuguuagaaaauaua

SEQ ID NO: 2066 - RNA, 22 nt, Artificial Sequence
  Sythetic
acagaaucuguuagaaaauaua

SEQ ID NO: 2067 - RNA, 23 nt, Artificial Sequence
  Sythetic
cacagaaucuguuagaaaauaua

SEQ ID NO: 2068 - RNA, 24 nt, Artificial Sequence
  Sythetic
acacagaaucuguuagaaaauaua

SEQ ID NO: 2069 - RNA, 21 nt, Artificial Sequence
  Sythetic
aguugagcuuaaaauaagcua

SEQ ID NO: 2070 - RNA, 22 nt, Artificial Sequence
  Sythetic
aaguugagcuuaaaauaagcua

SEQ ID NO: 2071 - RNA, 23 nt, Artificial Sequence
  Sythetic
uaaguugagcuuaaaauaagcua

SEQ ID NO: 2072 - RNA, 24 nt, Artificial Sequence
  Sythetic
uuaaguugagcuuaaaauaagcua

SEQ ID NO: 2073 - RNA, 18 nt, Artificial Sequence
  Sythetic
augcuguuucuuuugaag

SEQ ID NO: 2074 - RNA, 19 nt, Artificial Sequence
  Sythetic
aaugcuguuucuuuugaag

SEQ ID NO: 2075 - RNA, 20 nt, Artificial Sequence
  Sythetic
aaaugcuguuucuuuugaag

SEQ ID NO: 2076 - RNA, 18 nt, Artificial Sequence
  Sythetic
ccaacuuuaaauguagag

SEQ ID NO: 2077 - RNA, 19 nt, Artificial Sequence
  Sythetic
accaacuuuaaauguagag

SEQ ID NO: 2078 - RNA, 20 nt, Artificial Sequence
  Sythetic
aaccaacuuuaaauguagag

SEQ ID NO: 2079 - RNA, 18 nt, Artificial Sequence
  Sythetic
guuucuuuugaaggaggg

SEQ ID NO: 2080 - RNA, 19 nt, Artificial Sequence
  Sythetic
uguuucuuuugaaggaggg

SEQ ID NO: 2081 - RNA, 20 nt, Artificial Sequence
  Sythetic
cuguuucuuuugaaggaggg

SEQ ID NO: 2082 - RNA, 18 nt, Artificial Sequence
  Sythetic
gagagguuacuuaccggg

SEQ ID NO: 2083 - RNA, 19 nt, Artificial Sequence
  Sythetic
ugagagguuacuuaccggg

SEQ ID NO: 2084 - RNA, 20 nt, Artificial Sequence
  Sythetic
cugagagguuacuuaccggg

SEQ ID NO: 2085 - RNA, 18 nt, Artificial Sequence
  Sythetic
guuugccaaaugucuucu

SEQ ID NO: 2086 - RNA, 19 nt, Artificial Sequence
  Sythetic
uguuugccaaaugucuucu

SEQ ID NO: 2087 - RNA, 20 nt, Artificial Sequence
  Sythetic
guguuugccaaaugucuucu

SEQ ID NO: 2088 - RNA, 21 nt, Artificial Sequence
  Sythetic
gguguuugccaaaugucuucu

SEQ ID NO: 2089 - RNA, 22 nt, Artificial Sequence
  Sythetic
ugguguuugccaaaugucuucu

SEQ ID NO: 2090 - RNA, 23 nt, Artificial Sequence
  Sythetic
uugguguuugccaaaugucuucu

SEQ ID NO: 2091 - RNA, 24 nt, Artificial Sequence
  Sythetic
cuugguguuugccaaaugucuucu

SEQ ID NO: 2092 - RNA, 18 nt, Artificial Sequence
  Sythetic
aucuuucuuuugagaggu

SEQ ID NO: 2093 - RNA, 19 nt, Artificial Sequence
  Sythetic
aaucuuucuuuugagaggu

SEQ ID NO: 2094 - RNA, 20 nt, Artificial Sequence
  Sythetic
aaaucuuucuuuugagaggu

SEQ ID NO: 2095 - RNA, 18 nt, Artificial Sequence
  Sythetic
gaaaauucugauuaucuu

SEQ ID NO: 2096 - RNA, 19 nt, Artificial Sequence
  Sythetic
agaaaauucugauuaucuu

SEQ ID NO: 2097 - RNA, 20 nt, Artificial Sequence
  Sythetic
aagaaaauucugauuaucuu

SEQ ID NO: 2098 - RNA, 21 nt, Artificial Sequence
  Sythetic
uaagaaaauucugauuaucuu

SEQ ID NO: 2099 - RNA, 22 nt, Artificial Sequence
  Sythetic
uuaagaaaauucugauuaucuu

SEQ ID NO: 2100 - RNA, 23 nt, Artificial Sequence
  Sythetic
guuaagaaaauucugauuaucuu

SEQ ID NO: 2101 - RNA, 24 nt, Artificial Sequence
  Sythetic
gguuaagaaaauucugauuaucuu

SEQ ID NO: 2102 - RNA, 18 nt, Artificial Sequence
  Sythetic
guggagaaaaaggggaca

SEQ ID NO: 2103 - RNA, 19 nt, Artificial Sequence
  Sythetic
aguggagaaaaaggggaca

SEQ ID NO: 2104 - RNA, 20 nt, Artificial Sequence
  Sythetic
gaguggagaaaaaggggaca

SEQ ID NO: 2105 - RNA, 21 nt, Artificial Sequence
  Sythetic
agaguggagaaaaaggggaca

SEQ ID NO: 2106 - RNA, 22 nt, Artificial Sequence
  Sythetic
gagaguggagaaaaaggggaca

SEQ ID NO: 2107 - RNA, 23 nt, Artificial Sequence
  Sythetic
ggagaguggagaaaaaggggaca

SEQ ID NO: 2108 - RNA, 24 nt, Artificial Sequence
  Sythetic
gggagaguggagaaaaaggggaca

SEQ ID NO: 2109 - RNA, 18 nt, Artificial Sequence
  Sythetic
uaaucuuuaagauaagga

SEQ ID NO: 2110 - RNA, 19 nt, Artificial Sequence
  Sythetic
auaaucuuuaagauaagga

SEQ ID NO: 2111 - RNA, 20 nt, Artificial Sequence
  Sythetic
uauaaucuuuaagauaagga

SEQ ID NO: 2112 - RNA, 21 nt, Artificial Sequence
  Sythetic
auauaaucuuuaagauaagga

SEQ ID NO: 2113 - RNA, 22 nt, Artificial Sequence
  Sythetic
aauauaaucuuuaagauaagga

SEQ ID NO: 2114 - RNA, 23 nt, Artificial Sequence
  Sythetic
aaauauaaucuuuaagauaagga

SEQ ID NO: 2115 - RNA, 24 nt, Artificial Sequence
  Sythetic
aaaauauaaucuuuaagauaagga

SEQ ID NO: 2116 - RNA, 18 nt, Artificial Sequence
  Sythetic
aaagggucacaguuugga

SEQ ID NO: 2117 - RNA, 19 nt, Artificial Sequence
  Sythetic
gaaagggucacaguuugga

SEQ ID NO: 2118 - RNA, 20 nt, Artificial Sequence
  Sythetic
ggaaagggucacaguuugga

SEQ ID NO: 2119 - RNA, 18 nt, Artificial Sequence
  Sythetic
uuacagagaacaauaaua

SEQ ID NO: 2120 - RNA, 19 nt, Artificial Sequence
  Sythetic
uuuacagagaacaauaaua

SEQ ID NO: 2121 - RNA, 20 nt, Artificial Sequence
  Sythetic
guuuacagagaacaauaaua

SEQ ID NO: 2122 - RNA, 18 nt, Artificial Sequence
  Sythetic
ggggguuggggugggaua

SEQ ID NO: 2123 - RNA, 19 nt, Artificial Sequence
  Sythetic
uggggguuggggugggaua

SEQ ID NO: 2124 - RNA, 20 nt, Artificial Sequence
  Sythetic
guggggguuggggugggaua

SEQ ID NO: 2125 - RNA, 21 nt, Artificial Sequence
  Sythetic
uguggggguuggggugggaua

SEQ ID NO: 2126 - RNA, 22 nt, Artificial Sequence
  Sythetic
guguggggguuggggugggaua

SEQ ID NO: 2127 - RNA, 23 nt, Artificial Sequence
  Sythetic
uguguggggguuggggugggaua

SEQ ID NO: 2128 - RNA, 24 nt, Artificial Sequence
  Sythetic
cuguguggggguuggggugggaua

SEQ ID NO: 2129 - RNA, 18 nt, Artificial Sequence
  Sythetic
caggguuaaugugaaguc

SEQ ID NO: 2130 - RNA, 19 nt, Artificial Sequence
  Sythetic
acaggguuaaugugaaguc

SEQ ID NO: 2131 - RNA, 20 nt, Artificial Sequence
  Sythetic
cacaggguuaaugugaaguc

SEQ ID NO: 2132 - RNA, 18 nt, Artificial Sequence
  Sythetic
guacaaaucauuugcuuc

SEQ ID NO: 2133 - RNA, 19 nt, Artificial Sequence
  Sythetic
uguacaaaucauuugcuuc

SEQ ID NO: 2134 - RNA, 20 nt, Artificial Sequence
  Sythetic
uuguacaaaucauuugcuuc

SEQ ID NO: 2135 - RNA, 21 nt, Artificial Sequence
  Sythetic
cuuguacaaaucauuugcuuc

SEQ ID NO: 2136 - RNA, 22 nt, Artificial Sequence
  Sythetic
ucuuguacaaaucauuugcuuc

SEQ ID NO: 2137 - RNA, 23 nt, Artificial Sequence
  Sythetic
aucuuguacaaaucauuugcuuc

SEQ ID NO: 2138 - RNA, 24 nt, Artificial Sequence
  Sythetic
gaucuuguacaaaucauuugcuuc

SEQ ID NO: 2139 - RNA, 18 nt, Artificial Sequence
  Sythetic
agaaagauuugcagagag

SEQ ID NO: 2140 - RNA, 19 nt, Artificial Sequence
  Sythetic
aagaaagauuugcagagag

SEQ ID NO: 2141 - RNA, 20 nt, Artificial Sequence
  Sythetic
aaagaaagauuugcagagag

SEQ ID NO: 2142 - RNA, 21 nt, Artificial Sequence
  Sythetic
aaaagaaagauuugcagagag

SEQ ID NO: 2143 - RNA, 22 nt, Artificial Sequence
  Sythetic
caaaagaaagauuugcagagag

SEQ ID NO: 2144 - RNA, 23 nt, Artificial Sequence
  Sythetic
ucaaaagaaagauuugcagagag

SEQ ID NO: 2145 - RNA, 24 nt, Artificial Sequence
  Sythetic
cucaaaagaaagauuugcagagag

SEQ ID NO: 2146 - RNA, 18 nt, Artificial Sequence
  Sythetic
uguuaguuagcuucugag

SEQ ID NO: 2147 - RNA, 19 nt, Artificial Sequence
  Sythetic
cuguuaguuagcuucugag

SEQ ID NO: 2148 - RNA, 20 nt, Artificial Sequence
  Sythetic
ccuguuaguuagcuucugag

SEQ ID NO: 2149 - RNA, 18 nt, Artificial Sequence
  Sythetic
cuaacagauucuguguag

SEQ ID NO: 2150 - RNA, 19 nt, Artificial Sequence
  Sythetic
ucuaacagauucuguguag

SEQ ID NO: 2151 - RNA, 20 nt, Artificial Sequence
  Sythetic
uucuaacagauucuguguag

SEQ ID NO: 2152 - RNA, 18 nt, Artificial Sequence
  Sythetic
ugggauaggggauacggg

SEQ ID NO: 2153 - RNA, 19 nt, Artificial Sequence
  Sythetic
gugggauaggggauacggg

SEQ ID NO: 2154 - RNA, 20 nt, Artificial Sequence
  Sythetic
ggugggauaggggauacggg

SEQ ID NO: 2155 - RNA, 18 nt, Artificial Sequence
  Sythetic
ucuguguggggguugggg

SEQ ID NO: 2156 - RNA, 19 nt, Artificial Sequence
  Sythetic
aucuguguggggguugggg

SEQ ID NO: 2157 - RNA, 20 nt, Artificial Sequence
  Sythetic
caucuguguggggguugggg

SEQ ID NO: 2158 - RNA, 21 nt, Artificial Sequence
  Sythetic
gcaucuguguggggguugggg

SEQ ID NO: 2159 - RNA, 22 nt, Artificial Sequence
  Sythetic
agcaucuguguggggguugggg

SEQ ID NO: 2160 - RNA, 23 nt, Artificial Sequence
  Sythetic
gagcaucuguguggggguugggg

SEQ ID NO: 2161 - RNA, 24 nt, Artificial Sequence
  Sythetic
ugagcaucuguguggggguugggg

SEQ ID NO: 2162 - RNA, 18 nt, Artificial Sequence
  Sythetic
gagcaucugugugggggu

SEQ ID NO: 2163 - RNA, 19 nt, Artificial Sequence
  Sythetic
ugagcaucugugugggggu

SEQ ID NO: 2164 - RNA, 20 nt, Artificial Sequence
  Sythetic
gugagcaucugugugggggu

SEQ ID NO: 2165 - RNA, 18 nt, Artificial Sequence
  Sythetic
gguggugagcaucugugu

SEQ ID NO: 2166 - RNA, 19 nt, Artificial Sequence
  Sythetic
ggguggugagcaucugugu

SEQ ID NO: 2167 - RNA, 20 nt, Artificial Sequence
  Sythetic
uggguggugagcaucugugu

SEQ ID NO: 2168 - RNA, 18 nt, Artificial Sequence
  Sythetic
aagauacaaaacaugauu

SEQ ID NO: 2169 - RNA, 19 nt, Artificial Sequence
  Sythetic
aaagauacaaaacaugauu

SEQ ID NO: 2170 - RNA, 20 nt, Artificial Sequence
  Sythetic
caaagauacaaaacaugauu

SEQ ID NO: 2171 - RNA, 18 nt, Artificial Sequence
  Sythetic
ucuccagugagaugccuu

SEQ ID NO: 2172 - RNA, 19 nt, Artificial Sequence
  Sythetic
cucuccagugagaugccuu

SEQ ID NO: 2173 - RNA, 20 nt, Artificial Sequence
  Sythetic
ccucuccagugagaugccuu

SEQ ID NO: 2174 - RNA, 18 nt, Artificial Sequence
  Sythetic
aaggaaagggucacaguu

SEQ ID NO: 2175 - RNA, 19 nt, Artificial Sequence
  Sythetic
uaaggaaagggucacaguu

SEQ ID NO: 2176 - RNA, 20 nt, Artificial Sequence
  Sythetic
auaaggaaagggucacaguu

SEQ ID NO: 2177 - RNA, 21 nt, Artificial Sequence
  Sythetic
gauaaggaaagggucacaguu

SEQ ID NO: 2178 - RNA, 22 nt, Artificial Sequence
  Sythetic
agauaaggaaagggucacaguu

SEQ ID NO: 2179 - RNA, 23 nt, Artificial Sequence
  Sythetic
aagauaaggaaagggucacaguu

SEQ ID NO: 2180 - RNA, 24 nt, Artificial Sequence
  Sythetic
uaagauaaggaaagggucacaguu

SEQ ID NO: 2181 - RNA, 18 nt, Artificial Sequence
  Sythetic
aagcccacauuuuaguaa

SEQ ID NO: 2182 - RNA, 19 nt, Artificial Sequence
  Sythetic
aaagcccacauuuuaguaa

SEQ ID NO: 2183 - RNA, 20 nt, Artificial Sequence
  Sythetic
aaaagcccacauuuuaguaa

SEQ ID NO: 2184 - RNA, 21 nt, Artificial Sequence
  Sythetic
caaaagcccacauuuuaguaa

SEQ ID NO: 2185 - RNA, 22 nt, Artificial Sequence
  Sythetic
ucaaaagcccacauuuuaguaa

SEQ ID NO: 2186 - RNA, 23 nt, Artificial Sequence
  Sythetic
gucaaaagcccacauuuuaguaa

SEQ ID NO: 2187 - RNA, 24 nt, Artificial Sequence
  Sythetic
agucaaaagcccacauuuuaguaa

SEQ ID NO: 2188 - RNA, 18 nt, Artificial Sequence
  Sythetic
ugaaggcgaaaagaauca

SEQ ID NO: 2189 - RNA, 19 nt, Artificial Sequence
  Sythetic
uugaaggcgaaaagaauca

SEQ ID NO: 2190 - RNA, 20 nt, Artificial Sequence
  Sythetic
auugaaggcgaaaagaauca

SEQ ID NO: 2191 - RNA, 21 nt, Artificial Sequence
  Sythetic
uauugaaggcgaaaagaauca

SEQ ID NO: 2192 - RNA, 22 nt, Artificial Sequence
  Sythetic
guauugaaggcgaaaagaauca

SEQ ID NO: 2193 - RNA, 23 nt, Artificial Sequence
  Sythetic
uguauugaaggcgaaaagaauca

SEQ ID NO: 2194 - RNA, 24 nt, Artificial Sequence
  Sythetic
guguauugaaggcgaaaagaauca

SEQ ID NO: 2195 - RNA, 18 nt, Artificial Sequence
  Sythetic
augauuuguacaagauca

SEQ ID NO: 2196 - RNA, 19 nt, Artificial Sequence
  Sythetic
aaugauuuguacaagauca

SEQ ID NO: 2197 - RNA, 20 nt, Artificial Sequence
  Sythetic
aaaugauuuguacaagauca

SEQ ID NO: 2198 - RNA, 21 nt, Artificial Sequence
  Sythetic
caaaugauuuguacaagauca

SEQ ID NO: 2199 - RNA, 22 nt, Artificial Sequence
  Sythetic
gcaaaugauuuguacaagauca

SEQ ID NO: 2200 - RNA, 23 nt, Artificial Sequence
  Sythetic
agcaaaugauuuguacaagauca

SEQ ID NO: 2201 - RNA, 24 nt, Artificial Sequence
  Sythetic
aagcaaaugauuuguacaagauca

SEQ ID NO: 2202 - RNA, 18 nt, Artificial Sequence
  Sythetic
uauucagaaggcaucuca

SEQ ID NO: 2203 - RNA, 19 nt, Artificial Sequence
  Sythetic
auauucagaaggcaucuca

SEQ ID NO: 2204 - RNA, 20 nt, Artificial Sequence
  Sythetic
cauauucagaaggcaucuca

SEQ ID NO: 2205 - RNA, 18 nt, Artificial Sequence
  Sythetic
accaacuuuaaauguaga

SEQ ID NO: 2206 - RNA, 19 nt, Artificial Sequence
  Sythetic
aaccaacuuuaaauguaga

SEQ ID NO: 2207 - RNA, 20 nt, Artificial Sequence
  Sythetic
aaaccaacuuuaaauguaga

SEQ ID NO: 2208 - RNA, 21 nt, Artificial Sequence
  Sythetic
uaaaccaacuuuaaauguaga

SEQ ID NO: 2209 - RNA, 22 nt, Artificial Sequence
  Sythetic
uuaaaccaacuuuaaauguaga

SEQ ID NO: 2210 - RNA, 23 nt, Artificial Sequence
  Sythetic
cuuaaaccaacuuuaaauguaga

SEQ ID NO: 2211 - RNA, 24 nt, Artificial Sequence
  Sythetic
acuuaaaccaacuuuaaauguaga

SEQ ID NO: 2212 - RNA, 18 nt, Artificial Sequence
  Sythetic
aaaugcuguuucuuuuga

SEQ ID NO: 2213 - RNA, 19 nt, Artificial Sequence
  Sythetic
gaaaugcuguuucuuuuga

SEQ ID NO: 2214 - RNA, 20 nt, Artificial Sequence
  Sythetic
ggaaaugcuguuucuuuuga

SEQ ID NO: 2215 - RNA, 21 nt, Artificial Sequence
  Sythetic
aggaaaugcuguuucuuuuga

SEQ ID NO: 2216 - RNA, 22 nt, Artificial Sequence
  Sythetic
uaggaaaugcuguuucuuuuga

SEQ ID NO: 2217 - RNA, 23 nt, Artificial Sequence
  Sythetic
guaggaaaugcuguuucuuuuga

SEQ ID NO: 2218 - RNA, 24 nt, Artificial Sequence
  Sythetic
aguaggaaaugcuguuucuuuuga

SEQ ID NO: 2219 - RNA, 18 nt, Artificial Sequence
  Sythetic
aaaccaacuuuaaaugua

SEQ ID NO: 2220 - RNA, 19 nt, Artificial Sequence
  Sythetic
uaaaccaacuuuaaaugua

SEQ ID NO: 2221 - RNA, 20 nt, Artificial Sequence
  Sythetic
uuaaaccaacuuuaaaugua

SEQ ID NO: 2222 - RNA, 21 nt, Artificial Sequence
  Sythetic
cuuaaaccaacuuuaaaugua

SEQ ID NO: 2223 - RNA, 22 nt, Artificial Sequence
  Sythetic
acuuaaaccaacuuuaaaugua

SEQ ID NO: 2224 - RNA, 23 nt, Artificial Sequence
  Sythetic
aacuuaaaccaacuuuaaaugua

SEQ ID NO: 2225 - RNA, 24 nt, Artificial Sequence
  Sythetic
caacuuaaaccaacuuuaaaugua

SEQ ID NO: 2226 - RNA, 18 nt, Artificial Sequence
  Sythetic
guuaaaucauuaagugua

SEQ ID NO: 2227 - RNA, 19 nt, Artificial Sequence
  Sythetic
aguuaaaucauuaagugua

SEQ ID NO: 2228 - RNA, 20 nt, Artificial Sequence
  Sythetic
gaguuaaaucauuaagugua

SEQ ID NO: 2229 - RNA, 21 nt, Artificial Sequence
  Sythetic
ggaguuaaaucauuaagugua

SEQ ID NO: 2230 - RNA, 22 nt, Artificial Sequence
  Sythetic
uggaguuaaaucauuaagugua

SEQ ID NO: 2231 - RNA, 23 nt, Artificial Sequence
  Sythetic
guggaguuaaaucauuaagugua

SEQ ID NO: 2232 - RNA, 24 nt, Artificial Sequence
  Sythetic
gguggaguuaaaucauuaagugua

SEQ ID NO: 2233 - RNA, 18 nt, Artificial Sequence
  Sythetic
cggggagaguuucuugua

SEQ ID NO: 2234 - RNA, 19 nt, Artificial Sequence
  Sythetic
ccggggagaguuucuugua

SEQ ID NO: 2235 - RNA, 20 nt, Artificial Sequence
  Sythetic
accggggagaguuucuugua

SEQ ID NO: 2236 - RNA, 21 nt, Artificial Sequence
  Sythetic
uaccggggagaguuucuugua

SEQ ID NO: 2237 - RNA, 22 nt, Artificial Sequence
  Sythetic
uuaccggggagaguuucuugua

SEQ ID NO: 2238 - RNA, 23 nt, Artificial Sequence
  Sythetic
cuuaccggggagaguuucuugua

SEQ ID NO: 2239 - RNA, 24 nt, Artificial Sequence
  Sythetic
acuuaccggggagaguuucuugua

SEQ ID NO: 2240 - RNA, 18 nt, Artificial Sequence
  Sythetic
cagcugagagguuacuua

SEQ ID NO: 2241 - RNA, 19 nt, Artificial Sequence
  Sythetic
gcagcugagagguuacuua

SEQ ID NO: 2242 - RNA, 20 nt, Artificial Sequence
  Sythetic
agcagcugagagguuacuua

SEQ ID NO: 2243 - RNA, 21 nt, Artificial Sequence
  Sythetic
aagcagcugagagguuacuua

SEQ ID NO: 2244 - RNA, 22 nt, Artificial Sequence
  Sythetic
caagcagcugagagguuacuua

SEQ ID NO: 2245 - RNA, 23 nt, Artificial Sequence
  Sythetic
ccaagcagcugagagguuacuua

SEQ ID NO: 2246 - RNA, 24 nt, Artificial Sequence
  Sythetic
gccaagcagcugagagguuacuua

SEQ ID NO: 2247 - RNA, 18 nt, Artificial Sequence
  Sythetic
auucagaaggcaucucac

SEQ ID NO: 2248 - RNA, 19 nt, Artificial Sequence
  Sythetic
uauucagaaggcaucucac

SEQ ID NO: 2249 - RNA, 20 nt, Artificial Sequence
  Sythetic
auauucagaaggcaucucac

SEQ ID NO: 2250 - RNA, 18 nt, Artificial Sequence
  Sythetic
agcugagagguuacuuac

SEQ ID NO: 2251 - RNA, 19 nt, Artificial Sequence
  Sythetic
cagcugagagguuacuuac

SEQ ID NO: 2252 - RNA, 20 nt, Artificial Sequence
  Sythetic
gcagcugagagguuacuuac

SEQ ID NO: 2253 - RNA, 21 nt, Artificial Sequence
  Sythetic
agcagcugagagguuacuuac

SEQ ID NO: 2254 - RNA, 22 nt, Artificial Sequence
  Sythetic
aagcagcugagagguuacuuac

SEQ ID NO: 2255 - RNA, 23 nt, Artificial Sequence
  Sythetic
caagcagcugagagguuacuuac

SEQ ID NO: 2256 - RNA, 24 nt, Artificial Sequence
  Sythetic
ccaagcagcugagagguuacuuac

SEQ ID NO: 2257 - RNA, 18 nt, Artificial Sequence
  Sythetic
gcugagagguuacuuacc

SEQ ID NO: 2258 - RNA, 19 nt, Artificial Sequence
  Sythetic
agcugagagguuacuuacc

SEQ ID NO: 2259 - RNA, 20 nt, Artificial Sequence
  Sythetic
cagcugagagguuacuuacc

SEQ ID NO: 2260 - RNA, 21 nt, Artificial Sequence
  Sythetic
gcagcugagagguuacuuacc

SEQ ID NO: 2261 - RNA, 22 nt, Artificial Sequence
  Sythetic
agcagcugagagguuacuuacc

SEQ ID NO: 2262 - RNA, 23 nt, Artificial Sequence
  Sythetic
aagcagcugagagguuacuuacc

SEQ ID NO: 2263 - RNA, 24 nt, Artificial Sequence
  Sythetic
caagcagcugagagguuacuuacc

SEQ ID NO: 2264 - RNA, 18 nt, Artificial Sequence
  Sythetic
uaaaagaaauuacuaucc

SEQ ID NO: 2265 - RNA, 19 nt, Artificial Sequence
  Sythetic
guaaaagaaauuacuaucc

SEQ ID NO: 2266 - RNA, 20 nt, Artificial Sequence
  Sythetic
aguaaaagaaauuacuaucc

SEQ ID NO: 2267 - RNA, 21 nt, Artificial Sequence
  Sythetic
uaguaaaagaaauuacuaucc

SEQ ID NO: 2268 - RNA, 22 nt, Artificial Sequence
  Sythetic
uuaguaaaagaaauuacuaucc

SEQ ID NO: 2269 - RNA, 23 nt, Artificial Sequence
  Sythetic
uuuaguaaaagaaauuacuaucc

SEQ ID NO: 2270 - RNA, 24 nt, Artificial Sequence
  Sythetic
uuuuaguaaaagaaauuacuaucc

SEQ ID NO: 2271 - RNA, 18 nt, Artificial Sequence
  Sythetic
guugagcuuaaaauaagc

SEQ ID NO: 2272 - RNA, 19 nt, Artificial Sequence
  Sythetic
aguugagcuuaaaauaagc

SEQ ID NO: 2273 - RNA, 20 nt, Artificial Sequence
  Sythetic
aaguugagcuuaaaauaagc

SEQ ID NO: 2274 - RNA, 21 nt, Artificial Sequence
  Sythetic
uaaguugagcuuaaaauaagc

SEQ ID NO: 2275 - RNA, 22 nt, Artificial Sequence
  Sythetic
uuaaguugagcuuaaaauaagc

SEQ ID NO: 2276 - RNA, 23 nt, Artificial Sequence
  Sythetic
uuuaaguugagcuuaaaauaagc

SEQ ID NO: 2277 - RNA, 24 nt, Artificial Sequence
  Sythetic
uuuuaaguugagcuuaaaauaagc

SEQ ID NO: 2278 - RNA, 18 nt, Artificial Sequence
  Sythetic
aauaaaggauaucagagc

SEQ ID NO: 2279 - RNA, 19 nt, Artificial Sequence
  Sythetic
gaauaaaggauaucagagc

SEQ ID NO: 2280 - RNA, 20 nt, Artificial Sequence
  Sythetic
agaauaaaggauaucagagc

SEQ ID NO: 2281 - RNA, 21 nt, Artificial Sequence
  Sythetic
aagaauaaaggauaucagagc

SEQ ID NO: 2282 - RNA, 22 nt, Artificial Sequence
  Sythetic
aaagaauaaaggauaucagagc

SEQ ID NO: 2283 - RNA, 23 nt, Artificial Sequence
  Sythetic
uaaagaauaaaggauaucagagc

SEQ ID NO: 2284 - RNA, 24 nt, Artificial Sequence
  Sythetic
auaaagaauaaaggauaucagagc

SEQ ID NO: 2285 - RNA, 18 nt, Artificial Sequence
  Sythetic
uaaauguagagggggauc

SEQ ID NO: 2286 - RNA, 19 nt, Artificial Sequence
  Sythetic
uuaaauguagagggggauc

SEQ ID NO: 2287 - RNA, 20 nt, Artificial Sequence
  Sythetic
uuuaaauguagagggggauc

SEQ ID NO: 2288 - RNA, 21 nt, Artificial Sequence
  Sythetic
cuuuaaauguagagggggauc

SEQ ID NO: 2289 - RNA, 22 nt, Artificial Sequence
  Sythetic
acuuuaaauguagagggggauc

SEQ ID NO: 2290 - RNA, 23 nt, Artificial Sequence
  Sythetic
aacuuuaaauguagagggggauc

SEQ ID NO: 2291 - RNA, 24 nt, Artificial Sequence
  Sythetic
caacuuuaaauguagagggggauc

SEQ ID NO: 2292 - RNA, 18 nt, Artificial Sequence
  Sythetic
auauagacaguauaaaag

SEQ ID NO: 2293 - RNA, 19 nt, Artificial Sequence
  Sythetic
cauauagacaguauaaaag

SEQ ID NO: 2294 - RNA, 20 nt, Artificial Sequence
  Sythetic
ucauauagacaguauaaaag

SEQ ID NO: 2295 - RNA, 21 nt, Artificial Sequence
  Sythetic
aucauauagacaguauaaaag

SEQ ID NO: 2296 - RNA, 22 nt, Artificial Sequence
  Sythetic
aaucauauagacaguauaaaag

SEQ ID NO: 2297 - RNA, 23 nt, Artificial Sequence
  Sythetic
caaucauauagacaguauaaaag

SEQ ID NO: 2298 - RNA, 24 nt, Artificial Sequence
  Sythetic
ucaaucauauagacaguauaaaag

SEQ ID NO: 2299 - RNA, 18 nt, Artificial Sequence
  Sythetic
ucauuaaguguauugaag

SEQ ID NO: 2300 - RNA, 19 nt, Artificial Sequence
  Sythetic
aucauuaaguguauugaag

SEQ ID NO: 2301 - RNA, 20 nt, Artificial Sequence
  Sythetic
aaucauuaaguguauugaag

SEQ ID NO: 2302 - RNA, 21 nt, Artificial Sequence
  Sythetic
aaaucauuaaguguauugaag

SEQ ID NO: 2303 - RNA, 22 nt, Artificial Sequence
  Sythetic
uaaaucauuaaguguauugaag

SEQ ID NO: 2304 - RNA, 23 nt, Artificial Sequence
  Sythetic
uuaaaucauuaaguguauugaag

SEQ ID NO: 2305 - RNA, 24 nt, Artificial Sequence
  Sythetic
guuaaaucauuaaguguauugaag

SEQ ID NO: 2306 - RNA, 18 nt, Artificial Sequence
  Sythetic
acaguucuucuuuuuaag

SEQ ID NO: 2307 - RNA, 19 nt, Artificial Sequence
  Sythetic
aacaguucuucuuuuuaag

SEQ ID NO: 2308 - RNA, 20 nt, Artificial Sequence
  Sythetic
gaacaguucuucuuuuuaag

SEQ ID NO: 2309 - RNA, 21 nt, Artificial Sequence
  Sythetic
agaacaguucuucuuuuuaag

SEQ ID NO: 2310 - RNA, 22 nt, Artificial Sequence
  Sythetic
gagaacaguucuucuuuuuaag

SEQ ID NO: 2311 - RNA, 23 nt, Artificial Sequence
  Sythetic
agagaacaguucuucuuuuuaag

SEQ ID NO: 2312 - RNA, 24 nt, Artificial Sequence
  Sythetic
cagagaacaguucuucuuuuuaag

SEQ ID NO: 2313 - RNA, 18 nt, Artificial Sequence
  Sythetic
cucagcucuucuggccag

SEQ ID NO: 2314 - RNA, 19 nt, Artificial Sequence
  Sythetic
ucucagcucuucuggccag

SEQ ID NO: 2315 - RNA, 20 nt, Artificial Sequence
  Sythetic
gucucagcucuucuggccag

SEQ ID NO: 2316 - RNA, 21 nt, Artificial Sequence
  Sythetic
ugucucagcucuucuggccag

SEQ ID NO: 2317 - RNA, 22 nt, Artificial Sequence
  Sythetic
augucucagcucuucuggccag

SEQ ID NO: 2318 - RNA, 23 nt, Artificial Sequence
  Sythetic
gaugucucagcucuucuggccag

SEQ ID NO: 2319 - RNA, 24 nt, Artificial Sequence
  Sythetic
ggaugucucagcucuucuggccag

SEQ ID NO: 2320 - RNA, 18 nt, Artificial Sequence
  Sythetic
aacuaacaggccaagcag

SEQ ID NO: 2321 - RNA, 19 nt, Artificial Sequence
  Sythetic
uaacuaacaggccaagcag

SEQ ID NO: 2322 - RNA, 20 nt, Artificial Sequence
  Sythetic
cuaacuaacaggccaagcag

SEQ ID NO: 2323 - RNA, 21 nt, Artificial Sequence
  Sythetic
gcuaacuaacaggccaagcag

SEQ ID NO: 2324 - RNA, 22 nt, Artificial Sequence
  Sythetic
agcuaacuaacaggccaagcag

SEQ ID NO: 2325 - RNA, 23 nt, Artificial Sequence
  Sythetic
aagcuaacuaacaggccaagcag

SEQ ID NO: 2326 - RNA, 24 nt, Artificial Sequence
  Sythetic
gaagcuaacuaacaggccaagcag

SEQ ID NO: 2327 - RNA, 18 nt, Artificial Sequence
  Sythetic
aaaggauaucagagcuag

SEQ ID NO: 2328 - RNA, 19 nt, Artificial Sequence
  Sythetic
uaaaggauaucagagcuag

SEQ ID NO: 2329 - RNA, 20 nt, Artificial Sequence
  Sythetic
auaaaggauaucagagcuag

SEQ ID NO: 2330 - RNA, 21 nt, Artificial Sequence
  Sythetic
aauaaaggauaucagagcuag

SEQ ID NO: 2331 - RNA, 22 nt, Artificial Sequence
  Sythetic
gaauaaaggauaucagagcuag

SEQ ID NO: 2332 - RNA, 23 nt, Artificial Sequence
  Sythetic
agaauaaaggauaucagagcuag

SEQ ID NO: 2333 - RNA, 24 nt, Artificial Sequence
  Sythetic
aagaauaaaggauaucagagcuag

SEQ ID NO: 2334 - RNA, 18 nt, Artificial Sequence
  Sythetic
aaccaacuuuaaauguag

SEQ ID NO: 2335 - RNA, 19 nt, Artificial Sequence
  Sythetic
aaaccaacuuuaaauguag

SEQ ID NO: 2336 - RNA, 20 nt, Artificial Sequence
  Sythetic
uaaaccaacuuuaaauguag

SEQ ID NO: 2337 - RNA, 21 nt, Artificial Sequence
  Sythetic
uuaaaccaacuuuaaauguag

SEQ ID NO: 2338 - RNA, 22 nt, Artificial Sequence
  Sythetic
cuuaaaccaacuuuaaauguag

SEQ ID NO: 2339 - RNA, 23 nt, Artificial Sequence
  Sythetic
acuuaaaccaacuuuaaauguag

SEQ ID NO: 2340 - RNA, 24 nt, Artificial Sequence
  Sythetic
aacuuaaaccaacuuuaaauguag

SEQ ID NO: 2341 - RNA, 18 nt, Artificial Sequence
  Sythetic
ggggagaguuucuuguag

SEQ ID NO: 2342 - RNA, 19 nt, Artificial Sequence
  Sythetic
cggggagaguuucuuguag

SEQ ID NO: 2343 - RNA, 20 nt, Artificial Sequence
  Sythetic
ccggggagaguuucuuguag

SEQ ID NO: 2344 - RNA, 21 nt, Artificial Sequence
  Sythetic
accggggagaguuucuuguag

SEQ ID NO: 2345 - RNA, 22 nt, Artificial Sequence
  Sythetic
uaccggggagaguuucuuguag

SEQ ID NO: 2346 - RNA, 23 nt, Artificial Sequence
  Sythetic
uuaccggggagaguuucuuguag

SEQ ID NO: 2347 - RNA, 24 nt, Artificial Sequence
  Sythetic
cuuaccggggagaguuucuuguag

SEQ ID NO: 2348 - RNA, 18 nt, Artificial Sequence
  Sythetic
ggguuuaguucuccuuag

SEQ ID NO: 2349 - RNA, 19 nt, Artificial Sequence
  Sythetic
aggguuuaguucuccuuag

SEQ ID NO: 2350 - RNA, 20 nt, Artificial Sequence
  Sythetic
gaggguuuaguucuccuuag

SEQ ID NO: 2351 - RNA, 21 nt, Artificial Sequence
  Sythetic
agaggguuuaguucuccuuag

SEQ ID NO: 2352 - RNA, 22 nt, Artificial Sequence
  Sythetic
gagaggguuuaguucuccuuag

SEQ ID NO: 2353 - RNA, 23 nt, Artificial Sequence
  Sythetic
ggagaggguuuaguucuccuuag

SEQ ID NO: 2354 - RNA, 24 nt, Artificial Sequence
  Sythetic
uggagaggguuuaguucuccuuag

SEQ ID NO: 2355 - RNA, 18 nt, Artificial Sequence
  Sythetic
cugagagguuacuuaccg

SEQ ID NO: 2356 - RNA, 19 nt, Artificial Sequence
  Sythetic
gcugagagguuacuuaccg

SEQ ID NO: 2357 - RNA, 20 nt, Artificial Sequence
  Sythetic
agcugagagguuacuuaccg

SEQ ID NO: 2358 - RNA, 21 nt, Artificial Sequence
  Sythetic
cagcugagagguuacuuaccg

SEQ ID NO: 2359 - RNA, 22 nt, Artificial Sequence
  Sythetic
gcagcugagagguuacuuaccg

SEQ ID NO: 2360 - RNA, 23 nt, Artificial Sequence
  Sythetic
agcagcugagagguuacuuaccg

SEQ ID NO: 2361 - RNA, 24 nt, Artificial Sequence
  Sythetic
aagcagcugagagguuacuuaccg

SEQ ID NO: 2362 - RNA, 18 nt, Artificial Sequence
  Sythetic
uguuucuuuugaaggagg

SEQ ID NO: 2363 - RNA, 19 nt, Artificial Sequence
  Sythetic
cuguuucuuuugaaggagg

SEQ ID NO: 2364 - RNA, 20 nt, Artificial Sequence
  Sythetic
gcuguuucuuuugaaggagg

SEQ ID NO: 2365 - RNA, 21 nt, Artificial Sequence
  Sythetic
ugcuguuucuuuugaaggagg

SEQ ID NO: 2366 - RNA, 22 nt, Artificial Sequence
  Sythetic
augcuguuucuuuugaaggagg

SEQ ID NO: 2367 - RNA, 23 nt, Artificial Sequence
  Sythetic
aaugcuguuucuuuugaaggagg

SEQ ID NO: 2368 - RNA, 24 nt, Artificial Sequence
  Sythetic
aaaugcuguuucuuuugaaggagg

SEQ ID NO: 2369 - RNA, 18 nt, Artificial Sequence
  Sythetic
uuaaaccaacuuuaaaug

SEQ ID NO: 2370 - RNA, 19 nt, Artificial Sequence
  Sythetic
cuuaaaccaacuuuaaaug

SEQ ID NO: 2371 - RNA, 20 nt, Artificial Sequence
  Sythetic
acuuaaaccaacuuuaaaug

SEQ ID NO: 2372 - RNA, 21 nt, Artificial Sequence
  Sythetic
aacuuaaaccaacuuuaaaug

SEQ ID NO: 2373 - RNA, 22 nt, Artificial Sequence
  Sythetic
caacuuaaaccaacuuuaaaug

SEQ ID NO: 2374 - RNA, 23 nt, Artificial Sequence
  Sythetic
ccaacuuaaaccaacuuuaaaug

SEQ ID NO: 2375 - RNA, 24 nt, Artificial Sequence
  Sythetic
gccaacuuaaaccaacuuuaaaug

SEQ ID NO: 2376 - RNA, 18 nt, Artificial Sequence
  Sythetic
ucagaaggcaucucacug

SEQ ID NO: 2377 - RNA, 19 nt, Artificial Sequence
  Sythetic
uucagaaggcaucucacug

SEQ ID NO: 2378 - RNA, 20 nt, Artificial Sequence
  Sythetic
auucagaaggcaucucacug

SEQ ID NO: 2379 - RNA, 21 nt, Artificial Sequence
  Sythetic
uauucagaaggcaucucacug

SEQ ID NO: 2380 - RNA, 22 nt, Artificial Sequence
  Sythetic
auauucagaaggcaucucacug

SEQ ID NO: 2381 - RNA, 23 nt, Artificial Sequence
  Sythetic
cauauucagaaggcaucucacug

SEQ ID NO: 2382 - RNA, 24 nt, Artificial Sequence
  Sythetic
acauauucagaaggcaucucacug

SEQ ID NO: 2383 - RNA, 18 nt, Artificial Sequence
  Sythetic
accggggagaguuucuug

SEQ ID NO: 2384 - RNA, 19 nt, Artificial Sequence
  Sythetic
uaccggggagaguuucuug

SEQ ID NO: 2385 - RNA, 20 nt, Artificial Sequence
  Sythetic
uuaccggggagaguuucuug

SEQ ID NO: 2386 - RNA, 21 nt, Artificial Sequence
  Sythetic
cuuaccggggagaguuucuug

SEQ ID NO: 2387 - RNA, 22 nt, Artificial Sequence
  Sythetic
acuuaccggggagaguuucuug

SEQ ID NO: 2388 - RNA, 23 nt, Artificial Sequence
  Sythetic
uacuuaccggggagaguuucuug

SEQ ID NO: 2389 - RNA, 24 nt, Artificial Sequence
  Sythetic
uuacuuaccggggagaguuucuug

SEQ ID NO: 2390 - RNA, 18 nt, Artificial Sequence
  Sythetic
gaaaugcuguuucuuuug

SEQ ID NO: 2391 - RNA, 19 nt, Artificial Sequence
  Sythetic
ggaaaugcuguuucuuuug

SEQ ID NO: 2392 - RNA, 20 nt, Artificial Sequence
  Sythetic
aggaaaugcuguuucuuuug

SEQ ID NO: 2393 - RNA, 21 nt, Artificial Sequence
  Sythetic
uaggaaaugcuguuucuuuug

SEQ ID NO: 2394 - RNA, 22 nt, Artificial Sequence
  Sythetic
guaggaaaugcuguuucuuuug

SEQ ID NO: 2395 - RNA, 23 nt, Artificial Sequence
  Sythetic
aguaggaaaugcuguuucuuuug

SEQ ID NO: 2396 - RNA, 24 nt, Artificial Sequence
  Sythetic
aaguaggaaaugcuguuucuuuug

SEQ ID NO: 2397 - RNA, 18 nt, Artificial Sequence
  Sythetic
auugaaggcgaaaagaau

SEQ ID NO: 2398 - RNA, 19 nt, Artificial Sequence
  Sythetic
uauugaaggcgaaaagaau

SEQ ID NO: 2399 - RNA, 20 nt, Artificial Sequence
  Sythetic
guauugaaggcgaaaagaau

SEQ ID NO: 2400 - RNA, 21 nt, Artificial Sequence
  Sythetic
uguauugaaggcgaaaagaau

SEQ ID NO: 2401 - RNA, 22 nt, Artificial Sequence
  Sythetic
guguauugaaggcgaaaagaau

SEQ ID NO: 2402 - RNA, 23 nt, Artificial Sequence
  Sythetic
aguguauugaaggcgaaaagaau

SEQ ID NO: 2403 - RNA, 24 nt, Artificial Sequence
  Sythetic
aaguguauugaaggcgaaaagaau

SEQ ID NO: 2404 - RNA, 18 nt, Artificial Sequence
  Sythetic
auaaagaauaaaggauau

SEQ ID NO: 2405 - RNA, 19 nt, Artificial Sequence
  Sythetic
uauaaagaauaaaggauau

SEQ ID NO: 2406 - RNA, 20 nt, Artificial Sequence
  Sythetic
auauaaagaauaaaggauau

SEQ ID NO: 2407 - RNA, 21 nt, Artificial Sequence
  Sythetic
aauauaaagaauaaaggauau

SEQ ID NO: 2408 - RNA, 22 nt, Artificial Sequence
  Sythetic
aaauauaaagaauaaaggauau

SEQ ID NO: 2409 - RNA, 23 nt, Artificial Sequence
  Sythetic
aaaauauaaagaauaaaggauau

SEQ ID NO: 2410 - RNA, 24 nt, Artificial Sequence
  Sythetic
gaaaauauaaagaauaaaggauau

SEQ ID NO: 2411 - RNA, 18 nt, Artificial Sequence
  Sythetic
cuaacaggccaagcagcu

SEQ ID NO: 2412 - RNA, 19 nt, Artificial Sequence
  Sythetic
acuaacaggccaagcagcu

SEQ ID NO: 2413 - RNA, 20 nt, Artificial Sequence
  Sythetic
aacuaacaggccaagcagcu

SEQ ID NO: 2414 - RNA, 21 nt, Artificial Sequence
  Sythetic
uaacuaacaggccaagcagcu

SEQ ID NO: 2415 - RNA, 22 nt, Artificial Sequence
  Sythetic
cuaacuaacaggccaagcagcu

SEQ ID NO: 2416 - RNA, 23 nt, Artificial Sequence
  Sythetic
gcuaacuaacaggccaagcagcu

SEQ ID NO: 2417 - RNA, 24 nt, Artificial Sequence
  Sythetic
agcuaacuaacaggccaagcagcu

SEQ ID NO: 2418 - RNA, 18 nt, Artificial Sequence
  Sythetic
aaagucuuuuacucaucu

SEQ ID NO: 2419 - RNA, 19 nt, Artificial Sequence
  Sythetic
uaaagucuuuuacucaucu

SEQ ID NO: 2420 - RNA, 20 nt, Artificial Sequence
  Sythetic
guaaagucuuuuacucaucu

SEQ ID NO: 2421 - RNA, 21 nt, Artificial Sequence
  Sythetic
uguaaagucuuuuacucaucu

SEQ ID NO: 2422 - RNA, 22 nt, Artificial Sequence
  Sythetic
cuguaaagucuuuuacucaucu

SEQ ID NO: 2423 - RNA, 23 nt, Artificial Sequence
  Sythetic
ccuguaaagucuuuuacucaucu

SEQ ID NO: 2424 - RNA, 24 nt, Artificial Sequence
  Sythetic
uccuguaaagucuuuuacucaucu

SEQ ID NO: 2425 - RNA, 18 nt, Artificial Sequence
  Sythetic
uauagacaguauaaaagu

SEQ ID NO: 2426 - RNA, 19 nt, Artificial Sequence
  Sythetic
auauagacaguauaaaagu

SEQ ID NO: 2427 - RNA, 20 nt, Artificial Sequence
  Sythetic
cauauagacaguauaaaagu

SEQ ID NO: 2428 - RNA, 21 nt, Artificial Sequence
  Sythetic
ucauauagacaguauaaaagu

SEQ ID NO: 2429 - RNA, 22 nt, Artificial Sequence
  Sythetic
aucauauagacaguauaaaagu

SEQ ID NO: 2430 - RNA, 23 nt, Artificial Sequence
  Sythetic
aaucauauagacaguauaaaagu

SEQ ID NO: 2431 - RNA, 24 nt, Artificial Sequence
  Sythetic
caaucauauagacaguauaaaagu

SEQ ID NO: 2432 - RNA, 18 nt, Artificial Sequence
  Sythetic
cuuugauguuauaaccgu

SEQ ID NO: 2433 - RNA, 19 nt, Artificial Sequence
  Sythetic
ucuuugauguuauaaccgu

SEQ ID NO: 2434 - RNA, 20 nt, Artificial Sequence
  Sythetic
aucuuugauguuauaaccgu

SEQ ID NO: 2435 - RNA, 21 nt, Artificial Sequence
  Sythetic
uaucuuugauguuauaaccgu

SEQ ID NO: 2436 - RNA, 22 nt, Artificial Sequence
  Sythetic
guaucuuugauguuauaaccgu

SEQ ID NO: 2437 - RNA, 23 nt, Artificial Sequence
  Sythetic
uguaucuuugauguuauaaccgu

SEQ ID NO: 2438 - RNA, 24 nt, Artificial Sequence
  Sythetic
uuguaucuuugauguuauaaccgu

SEQ ID NO: 2439 - RNA, 18 nt, Artificial Sequence
  Sythetic
agagaauagaucucuggu

SEQ ID NO: 2440 - RNA, 19 nt, Artificial Sequence
  Sythetic
uagagaauagaucucuggu

SEQ ID NO: 2441 - RNA, 20 nt, Artificial Sequence
  Sythetic
cuagagaauagaucucuggu

SEQ ID NO: 2442 - RNA, 21 nt, Artificial Sequence
  Sythetic
gcuagagaauagaucucuggu

SEQ ID NO: 2443 - RNA, 22 nt, Artificial Sequence
  Sythetic
agcuagagaauagaucucuggu

SEQ ID NO: 2444 - RNA, 23 nt, Artificial Sequence
  Sythetic
aagcuagagaauagaucucuggu

SEQ ID NO: 2445 - RNA, 24 nt, Artificial Sequence
  Sythetic
uaagcuagagaauagaucucuggu

SEQ ID NO: 2446 - RNA, 18 nt, Artificial Sequence
  Sythetic
ccacuacacagaaucugu

SEQ ID NO: 2447 - RNA, 19 nt, Artificial Sequence
  Sythetic
cccacuacacagaaucugu

SEQ ID NO: 2448 - RNA, 20 nt, Artificial Sequence
  Sythetic
ucccacuacacagaaucugu

SEQ ID NO: 2449 - RNA, 21 nt, Artificial Sequence
  Sythetic
aucccacuacacagaaucugu

SEQ ID NO: 2450 - RNA, 22 nt, Artificial Sequence
  Sythetic
caucccacuacacagaaucugu

SEQ ID NO: 2451 - RNA, 23 nt, Artificial Sequence
  Sythetic
ucaucccacuacacagaaucugu

SEQ ID NO: 2452 - RNA, 24 nt, Artificial Sequence
  Sythetic
cucaucccacuacacagaaucugu

SEQ ID NO: 2453 - RNA, 18 nt, Artificial Sequence
  Sythetic
auauuuuaagauaauugu

SEQ ID NO: 2454 - RNA, 19 nt, Artificial Sequence
  Sythetic
uauauuuuaagauaauugu

SEQ ID NO: 2455 - RNA, 20 nt, Artificial Sequence
  Sythetic
uuauauuuuaagauaauugu

SEQ ID NO: 2456 - RNA, 21 nt, Artificial Sequence
  Sythetic
auuauauuuuaagauaauugu

SEQ ID NO: 2457 - RNA, 22 nt, Artificial Sequence
  Sythetic
gauuauauuuuaagauaauugu

SEQ ID NO: 2458 - RNA, 23 nt, Artificial Sequence
  Sythetic
agauuauauuuuaagauaauugu

SEQ ID NO: 2459 - RNA, 24 nt, Artificial Sequence
  Sythetic
aagauuauauuuuaagauaauugu

SEQ ID NO: 2460 - RNA, 18 nt, Artificial Sequence
  Sythetic
ccggggagaguuucuugu

SEQ ID NO: 2461 - RNA, 19 nt, Artificial Sequence
  Sythetic
accggggagaguuucuugu

SEQ ID NO: 2462 - RNA, 20 nt, Artificial Sequence
  Sythetic
uaccggggagaguuucuugu

SEQ ID NO: 2463 - RNA, 21 nt, Artificial Sequence
  Sythetic
uuaccggggagaguuucuugu

SEQ ID NO: 2464 - RNA, 22 nt, Artificial Sequence
  Sythetic
cuuaccggggagaguuucuugu

SEQ ID NO: 2465 - RNA, 23 nt, Artificial Sequence
  Sythetic
acuuaccggggagaguuucuugu

SEQ ID NO: 2466 - RNA, 24 nt, Artificial Sequence
  Sythetic
uacuuaccggggagaguuucuugu

SEQ ID NO: 2467 - RNA, 18 nt, Artificial Sequence
  Sythetic
ucucugcaaaucuuucuu

SEQ ID NO: 2468 - RNA, 19 nt, Artificial Sequence
  Sythetic
cucucugcaaaucuuucuu

SEQ ID NO: 2469 - RNA, 20 nt, Artificial Sequence
  Sythetic
ucucucugcaaaucuuucuu

SEQ ID NO: 2470 - RNA, 21 nt, Artificial Sequence
  Sythetic
aucucucugcaaaucuuucuu

SEQ ID NO: 2471 - RNA, 22 nt, Artificial Sequence
  Sythetic
caucucucugcaaaucuuucuu

SEQ ID NO: 2472 - RNA, 23 nt, Artificial Sequence
  Sythetic
ucaucucucugcaaaucuuucuu

SEQ ID NO: 2473 - RNA, 24 nt, Artificial Sequence
  Sythetic
cucaucucucugcaaaucuuucuu

SEQ ID NO: 2474 - RNA, 18 nt, Artificial Sequence
  Sythetic
uaggaaaugcuguuucuu

SEQ ID NO: 2475 - RNA, 19 nt, Artificial Sequence
  Sythetic
guaggaaaugcuguuucuu

SEQ ID NO: 2476 - RNA, 20 nt, Artificial Sequence
  Sythetic
aguaggaaaugcuguuucuu

SEQ ID NO: 2477 - RNA, 21 nt, Artificial Sequence
  Sythetic
aaguaggaaaugcuguuucuu

SEQ ID NO: 2478 - RNA, 22 nt, Artificial Sequence
  Sythetic
aaaguaggaaaugcuguuucuu

SEQ ID NO: 2479 - RNA, 23 nt, Artificial Sequence
  Sythetic
aaaaguaggaaaugcuguuucuu

SEQ ID NO: 2480 - RNA, 24 nt, Artificial Sequence
  Sythetic
uaaaaguaggaaaugcuguuucuu

SEQ ID NO: 2481 - RNA, 18 nt, Artificial Sequence
  Sythetic
caguaaggcuaaaagguu

SEQ ID NO: 2482 - RNA, 19 nt, Artificial Sequence
  Sythetic
acaguaaggcuaaaagguu

SEQ ID NO: 2483 - RNA, 20 nt, Artificial Sequence
  Sythetic
aacaguaaggcuaaaagguu

SEQ ID NO: 2484 - RNA, 21 nt, Artificial Sequence
  Sythetic
caacaguaaggcuaaaagguu

SEQ ID NO: 2485 - RNA, 22 nt, Artificial Sequence
  Sythetic
ucaacaguaaggcuaaaagguu

SEQ ID NO: 2486 - RNA, 23 nt, Artificial Sequence
  Sythetic
uucaacaguaaggcuaaaagguu

SEQ ID NO: 2487 - RNA, 24 nt, Artificial Sequence
  Sythetic
uuucaacaguaaggcuaaaagguu

SEQ ID NO: 2488 - RNA, 18 nt, Artificial Sequence
  Sythetic
uggucugaagguuuauuu

SEQ ID NO: 2489 - RNA, 19 nt, Artificial Sequence
  Sythetic
cuggucugaagguuuauuu

SEQ ID NO: 2490 - RNA, 20 nt, Artificial Sequence
  Sythetic
ucuggucugaagguuuauuu

SEQ ID NO: 2491 - RNA, 21 nt, Artificial Sequence
  Sythetic
cucuggucugaagguuuauuu

SEQ ID NO: 2492 - RNA, 22 nt, Artificial Sequence
  Sythetic
ucucuggucugaagguuuauuu

SEQ ID NO: 2493 - RNA, 23 nt, Artificial Sequence
  Sythetic
aucucuggucugaagguuuauuu

SEQ ID NO: 2494 - RNA, 24 nt, Artificial Sequence
  Sythetic
gaucucuggucugaagguuuauuu

SEQ ID NO: 2495 - RNA, 18 nt, Artificial Sequence
  Sythetic
ucugcaaaucuuucuuuu

SEQ ID NO: 2496 - RNA, 19 nt, Artificial Sequence
  Sythetic
cucugcaaaucuuucuuuu

SEQ ID NO: 2497 - RNA, 20 nt, Artificial Sequence
  Sythetic
ucucugcaaaucuuucuuuu

SEQ ID NO: 2498 - RNA, 21 nt, Artificial Sequence
  Sythetic
cucucugcaaaucuuucuuuu

SEQ ID NO: 2499 - RNA, 22 nt, Artificial Sequence
  Sythetic
ucucucugcaaaucuuucuuuu

SEQ ID NO: 2500 - RNA, 23 nt, Artificial Sequence
  Sythetic
aucucucugcaaaucuuucuuuu

SEQ ID NO: 2501 - RNA, 24 nt, Artificial Sequence
  Sythetic
caucucucugcaaaucuuucuuuu

SEQ ID NO: 2502 - RNA, 18 nt, Artificial Sequence
  Sythetic
ggggagaguggagaaaaa

SEQ ID NO: 2503 - RNA, 19 nt, Artificial Sequence
  Sythetic
cggggagaguggagaaaaa

SEQ ID NO: 2504 - RNA, 20 nt, Artificial Sequence
  Sythetic
acggggagaguggagaaaaa

SEQ ID NO: 2505 - RNA, 21 nt, Artificial Sequence
  Sythetic
uacggggagaguggagaaaaa

SEQ ID NO: 2506 - RNA, 22 nt, Artificial Sequence
  Sythetic
auacggggagaguggagaaaaa

SEQ ID NO: 2507 - RNA, 23 nt, Artificial Sequence
  Sythetic
gauacggggagaguggagaaaaa

SEQ ID NO: 2508 - RNA, 24 nt, Artificial Sequence
  Sythetic
ggauacggggagaguggagaaaaa

SEQ ID NO: 2509 - RNA, 18 nt, Artificial Sequence
  Sythetic
cggggagaguggagaaaa

SEQ ID NO: 2510 - RNA, 19 nt, Artificial Sequence
  Sythetic
acggggagaguggagaaaa

SEQ ID NO: 2511 - RNA, 20 nt, Artificial Sequence
  Sythetic
uacggggagaguggagaaaa

SEQ ID NO: 2512 - RNA, 21 nt, Artificial Sequence
  Sythetic
auacggggagaguggagaaaa

SEQ ID NO: 2513 - RNA, 22 nt, Artificial Sequence
  Sythetic
gauacggggagaguggagaaaa

SEQ ID NO: 2514 - RNA, 23 nt, Artificial Sequence
  Sythetic
ggauacggggagaguggagaaaa

SEQ ID NO: 2515 - RNA, 24 nt, Artificial Sequence
  Sythetic
gggauacggggagaguggagaaaa

SEQ ID NO: 2516 - RNA, 18 nt, Artificial Sequence
  Sythetic
acggggagaguggagaaa

SEQ ID NO: 2517 - RNA, 19 nt, Artificial Sequence
  Sythetic
uacggggagaguggagaaa

SEQ ID NO: 2518 - RNA, 20 nt, Artificial Sequence
  Sythetic
auacggggagaguggagaaa

SEQ ID NO: 2519 - RNA, 21 nt, Artificial Sequence
  Sythetic
gauacggggagaguggagaaa

SEQ ID NO: 2520 - RNA, 22 nt, Artificial Sequence
  Sythetic
ggauacggggagaguggagaaa

SEQ ID NO: 2521 - RNA, 23 nt, Artificial Sequence
  Sythetic
gggauacggggagaguggagaaa

SEQ ID NO: 2522 - RNA, 24 nt, Artificial Sequence
  Sythetic
ggggauacggggagaguggagaaa

SEQ ID NO: 2523 - RNA, 18 nt, Artificial Sequence
  Sythetic
uuuuaagcucaacuuaaa

SEQ ID NO: 2524 - RNA, 19 nt, Artificial Sequence
  Sythetic
auuuuaagcucaacuuaaa

SEQ ID NO: 2525 - RNA, 20 nt, Artificial Sequence
  Sythetic
uauuuuaagcucaacuuaaa

SEQ ID NO: 2526 - RNA, 21 nt, Artificial Sequence
  Sythetic
uuauuuuaagcucaacuuaaa

SEQ ID NO: 2527 - RNA, 22 nt, Artificial Sequence
  Sythetic
cuuauuuuaagcucaacuuaaa

SEQ ID NO: 2528 - RNA, 23 nt, Artificial Sequence
  Sythetic
gcuuauuuuaagcucaacuuaaa

SEQ ID NO: 2529 - RNA, 24 nt, Artificial Sequence
  Sythetic
agcuuauuuuaagcucaacuuaaa

SEQ ID NO: 2530 - RNA, 18 nt, Artificial Sequence
  Sythetic
ugagugaaagacuuuaaa

SEQ ID NO: 2531 - RNA, 19 nt, Artificial Sequence
  Sythetic
gugagugaaagacuuuaaa

SEQ ID NO: 2532 - RNA, 20 nt, Artificial Sequence
  Sythetic
ugugagugaaagacuuuaaa

SEQ ID NO: 2533 - RNA, 21 nt, Artificial Sequence
  Sythetic
uugugagugaaagacuuuaaa

SEQ ID NO: 2534 - RNA, 22 nt, Artificial Sequence
  Sythetic
auugugagugaaagacuuuaaa

SEQ ID NO: 2535 - RNA, 23 nt, Artificial Sequence
  Sythetic
gauugugagugaaagacuuuaaa

SEQ ID NO: 2536 - RNA, 24 nt, Artificial Sequence
  Sythetic
ugauugugagugaaagacuuuaaa

SEQ ID NO: 2537 - RNA, 18 nt, Artificial Sequence
  Sythetic
acaauccuuaccucucaa

SEQ ID NO: 2538 - RNA, 19 nt, Artificial Sequence
  Sythetic
aacaauccuuaccucucaa

SEQ ID NO: 2539 - RNA, 20 nt, Artificial Sequence
  Sythetic
uaacaauccuuaccucucaa

SEQ ID NO: 2540 - RNA, 21 nt, Artificial Sequence
  Sythetic
cuaacaauccuuaccucucaa

SEQ ID NO: 2541 - RNA, 22 nt, Artificial Sequence
  Sythetic
acuaacaauccuuaccucucaa

SEQ ID NO: 2542 - RNA, 23 nt, Artificial Sequence
  Sythetic
aacuaacaauccuuaccucucaa

SEQ ID NO: 2543 - RNA, 24 nt, Artificial Sequence
  Sythetic
uaacuaacaauccuuaccucucaa

SEQ ID NO: 2544 - RNA, 18 nt, Artificial Sequence
  Sythetic
aacuccacccuccuucaa

SEQ ID NO: 2545 - RNA, 19 nt, Artificial Sequence
  Sythetic
uaacuccacccuccuucaa

SEQ ID NO: 2546 - RNA, 20 nt, Artificial Sequence
  Sythetic
uuaacuccacccuccuucaa

SEQ ID NO: 2547 - RNA, 21 nt, Artificial Sequence
  Sythetic
uuuaacuccacccuccuucaa

SEQ ID NO: 2548 - RNA, 22 nt, Artificial Sequence
  Sythetic
auuuaacuccacccuccuucaa

SEQ ID NO: 2549 - RNA, 23 nt, Artificial Sequence
  Sythetic
gauuuaacuccacccuccuucaa

SEQ ID NO: 2550 - RNA, 24 nt, Artificial Sequence
  Sythetic
ugauuuaacuccacccuccuucaa

SEQ ID NO: 2551 - RNA, 18 nt, Artificial Sequence
  Sythetic
gugagugaaagacuuuaa

SEQ ID NO: 2552 - RNA, 19 nt, Artificial Sequence
  Sythetic
ugugagugaaagacuuuaa

SEQ ID NO: 2553 - RNA, 20 nt, Artificial Sequence
  Sythetic
uugugagugaaagacuuuaa

SEQ ID NO: 2554 - RNA, 21 nt, Artificial Sequence
  Sythetic
auugugagugaaagacuuuaa

SEQ ID NO: 2555 - RNA, 22 nt, Artificial Sequence
  Sythetic
gauugugagugaaagacuuuaa

SEQ ID NO: 2556 - RNA, 23 nt, Artificial Sequence
  Sythetic
ugauugugagugaaagacuuuaa

SEQ ID NO: 2557 - RNA, 24 nt, Artificial Sequence
  Sythetic
augauugugagugaaagacuuuaa

SEQ ID NO: 2558 - RNA, 18 nt, Artificial Sequence
  Sythetic
gacuuuacaggaaaccca

SEQ ID NO: 2559 - RNA, 19 nt, Artificial Sequence
  Sythetic
agacuuuacaggaaaccca

SEQ ID NO: 2560 - RNA, 20 nt, Artificial Sequence
  Sythetic
aagacuuuacaggaaaccca

SEQ ID NO: 2561 - RNA, 21 nt, Artificial Sequence
  Sythetic
aaagacuuuacaggaaaccca

SEQ ID NO: 2562 - RNA, 22 nt, Artificial Sequence
  Sythetic
aaaagacuuuacaggaaaccca

SEQ ID NO: 2563 - RNA, 23 nt, Artificial Sequence
  Sythetic
uaaaagacuuuacaggaaaccca

SEQ ID NO: 2564 - RNA, 24 nt, Artificial Sequence
  Sythetic
guaaaagacuuuacaggaaaccca

SEQ ID NO: 2565 - RNA, 18 nt, Artificial Sequence
  Sythetic
caaaaacaaaauaaucca

SEQ ID NO: 2566 - RNA, 19 nt, Artificial Sequence
  Sythetic
acaaaaacaaaauaaucca

SEQ ID NO: 2567 - RNA, 20 nt, Artificial Sequence
  Sythetic
aacaaaaacaaaauaaucca

SEQ ID NO: 2568 - RNA, 21 nt, Artificial Sequence
  Sythetic
gaacaaaaacaaaauaaucca

SEQ ID NO: 2569 - RNA, 22 nt, Artificial Sequence
  Sythetic
agaacaaaaacaaaauaaucca

SEQ ID NO: 2570 - RNA, 23 nt, Artificial Sequence
  Sythetic
gagaacaaaaacaaaauaaucca

SEQ ID NO: 2571 - RNA, 24 nt, Artificial Sequence
  Sythetic
agagaacaaaaacaaaauaaucca

SEQ ID NO: 2572 - RNA, 18 nt, Artificial Sequence
  Sythetic
agaacuaaacccucucca

SEQ ID NO: 2573 - RNA, 19 nt, Artificial Sequence
  Sythetic
gagaacuaaacccucucca

SEQ ID NO: 2574 - RNA, 20 nt, Artificial Sequence
  Sythetic
ggagaacuaaacccucucca

SEQ ID NO: 2575 - RNA, 21 nt, Artificial Sequence
  Sythetic
aggagaacuaaacccucucca

SEQ ID NO: 2576 - RNA, 22 nt, Artificial Sequence
  Sythetic
aaggagaacuaaacccucucca

SEQ ID NO: 2577 - RNA, 23 nt, Artificial Sequence
  Sythetic
uaaggagaacuaaacccucucca

SEQ ID NO: 2578 - RNA, 24 nt, Artificial Sequence
  Sythetic
cuaaggagaacuaaacccucucca

SEQ ID NO: 2579 - RNA, 18 nt, Artificial Sequence
  Sythetic
uguguagugggaugagca

SEQ ID NO: 2580 - RNA, 19 nt, Artificial Sequence
  Sythetic
cuguguagugggaugagca

SEQ ID NO: 2581 - RNA, 20 nt, Artificial Sequence
  Sythetic
ucuguguagugggaugagca

SEQ ID NO: 2582 - RNA, 21 nt, Artificial Sequence
  Sythetic
uucuguguagugggaugagca

SEQ ID NO: 2583 - RNA, 22 nt, Artificial Sequence
  Sythetic
auucuguguagugggaugagca

SEQ ID NO: 2584 - RNA, 23 nt, Artificial Sequence
  Sythetic
gauucuguguagugggaugagca

SEQ ID NO: 2585 - RNA, 24 nt, Artificial Sequence
  Sythetic
agauucuguguagugggaugagca

SEQ ID NO: 2586 - RNA, 18 nt, Artificial Sequence
  Sythetic
ucaaaagaaagauuugca

SEQ ID NO: 2587 - RNA, 19 nt, Artificial Sequence
  Sythetic
cucaaaagaaagauuugca

SEQ ID NO: 2588 - RNA, 20 nt, Artificial Sequence
  Sythetic
ucucaaaagaaagauuugca

SEQ ID NO: 2589 - RNA, 21 nt, Artificial Sequence
  Sythetic
cucucaaaagaaagauuugca

SEQ ID NO: 2590 - RNA, 22 nt, Artificial Sequence
  Sythetic
ccucucaaaagaaagauuugca

SEQ ID NO: 2591 - RNA, 23 nt, Artificial Sequence
  Sythetic
accucucaaaagaaagauuugca

SEQ ID NO: 2592 - RNA, 24 nt, Artificial Sequence
  Sythetic
uaccucucaaaagaaagauuugca

SEQ ID NO: 2593 - RNA, 18 nt, Artificial Sequence
  Sythetic
auaggggauacggggaga

SEQ ID NO: 2594 - RNA, 19 nt, Artificial Sequence
  Sythetic
gauaggggauacggggaga

SEQ ID NO: 2595 - RNA, 20 nt, Artificial Sequence
  Sythetic
ggauaggggauacggggaga

SEQ ID NO: 2596 - RNA, 21 nt, Artificial Sequence
  Sythetic
gggauaggggauacggggaga

SEQ ID NO: 2597 - RNA, 22 nt, Artificial Sequence
  Sythetic
ugggauaggggauacggggaga

SEQ ID NO: 2598 - RNA, 23 nt, Artificial Sequence
  Sythetic
gugggauaggggauacggggaga

SEQ ID NO: 2599 - RNA, 24 nt, Artificial Sequence
  Sythetic
ggugggauaggggauacggggaga

SEQ ID NO: 2600 - RNA, 18 nt, Artificial Sequence
  Sythetic
guggggguugggguggga

SEQ ID NO: 2601 - RNA, 19 nt, Artificial Sequence
  Sythetic
uguggggguugggguggga

SEQ ID NO: 2602 - RNA, 20 nt, Artificial Sequence
  Sythetic
guguggggguugggguggga

SEQ ID NO: 2603 - RNA, 21 nt, Artificial Sequence
  Sythetic
uguguggggguugggguggga

SEQ ID NO: 2604 - RNA, 22 nt, Artificial Sequence
  Sythetic
cuguguggggguugggguggga

SEQ ID NO: 2605 - RNA, 23 nt, Artificial Sequence
  Sythetic
ucuguguggggguugggguggga

SEQ ID NO: 2606 - RNA, 24 nt, Artificial Sequence
  Sythetic
aucuguguggggguugggguggga

SEQ ID NO: 2607 - RNA, 18 nt, Artificial Sequence
  Sythetic
uacaaaacaugauuguga

SEQ ID NO: 2608 - RNA, 19 nt, Artificial Sequence
  Sythetic
auacaaaacaugauuguga

SEQ ID NO: 2609 - RNA, 20 nt, Artificial Sequence
  Sythetic
gauacaaaacaugauuguga

SEQ ID NO: 2610 - RNA, 21 nt, Artificial Sequence
  Sythetic
agauacaaaacaugauuguga

SEQ ID NO: 2611 - RNA, 22 nt, Artificial Sequence
  Sythetic
aagauacaaaacaugauuguga

SEQ ID NO: 2612 - RNA, 23 nt, Artificial Sequence
  Sythetic
aaagauacaaaacaugauuguga

SEQ ID NO: 2613 - RNA, 24 nt, Artificial Sequence
  Sythetic
caaagauacaaaacaugauuguga

SEQ ID NO: 2614 - RNA, 18 nt, Artificial Sequence
  Sythetic
aauauaaucuuuaagaua

SEQ ID NO: 2615 - RNA, 19 nt, Artificial Sequence
  Sythetic
aaauauaaucuuuaagaua

SEQ ID NO: 2616 - RNA, 20 nt, Artificial Sequence
  Sythetic
aaaauauaaucuuuaagaua

SEQ ID NO: 2617 - RNA, 21 nt, Artificial Sequence
  Sythetic
uaaaauauaaucuuuaagaua

SEQ ID NO: 2618 - RNA, 22 nt, Artificial Sequence
  Sythetic
uuaaaauauaaucuuuaagaua

SEQ ID NO: 2619 - RNA, 23 nt, Artificial Sequence
  Sythetic
cuuaaaauauaaucuuuaagaua

SEQ ID NO: 2620 - RNA, 24 nt, Artificial Sequence
  Sythetic
ucuuaaaauauaaucuuuaagaua

SEQ ID NO: 2621 - RNA, 18 nt, Artificial Sequence
  Sythetic
ggggugggauaggggaua

SEQ ID NO: 2622 - RNA, 19 nt, Artificial Sequence
  Sythetic
uggggugggauaggggaua

SEQ ID NO: 2623 - RNA, 20 nt, Artificial Sequence
  Sythetic
uuggggugggauaggggaua

SEQ ID NO: 2624 - RNA, 21 nt, Artificial Sequence
  Sythetic
guuggggugggauaggggaua

SEQ ID NO: 2625 - RNA, 22 nt, Artificial Sequence
  Sythetic
gguuggggugggauaggggaua

SEQ ID NO: 2626 - RNA, 23 nt, Artificial Sequence
  Sythetic
ggguuggggugggauaggggaua

SEQ ID NO: 2627 - RNA, 24 nt, Artificial Sequence
  Sythetic
gggguuggggugggauaggggaua

SEQ ID NO: 2628 - RNA, 18 nt, Artificial Sequence
  Sythetic
aaaucuuaucuucugcua

SEQ ID NO: 2629 - RNA, 19 nt, Artificial Sequence
  Sythetic
gaaaucuuaucuucugcua

SEQ ID NO: 2630 - RNA, 20 nt, Artificial Sequence
  Sythetic
ugaaaucuuaucuucugcua

SEQ ID NO: 2631 - RNA, 21 nt, Artificial Sequence
  Sythetic
uugaaaucuuaucuucugcua

SEQ ID NO: 2632 - RNA, 22 nt, Artificial Sequence
  Sythetic
cuugaaaucuuaucuucugcua

SEQ ID NO: 2633 - RNA, 23 nt, Artificial Sequence
  Sythetic
ucuugaaaucuuaucuucugcua

SEQ ID NO: 2634 - RNA, 24 nt, Artificial Sequence
  Sythetic
aucuugaaaucuuaucuucugcua

SEQ ID NO: 2635 - RNA, 18 nt, Artificial Sequence
  Sythetic
ucuaacagauucugugua

SEQ ID NO: 2636 - RNA, 19 nt, Artificial Sequence
  Sythetic
uucuaacagauucugugua

SEQ ID NO: 2637 - RNA, 20 nt, Artificial Sequence
  Sythetic
uuucuaacagauucugugua

SEQ ID NO: 2638 - RNA, 21 nt, Artificial Sequence
  Sythetic
uuuucuaacagauucugugua

SEQ ID NO: 2639 - RNA, 22 nt, Artificial Sequence
  Sythetic
auuuucuaacagauucugugua

SEQ ID NO: 2640 - RNA, 23 nt, Artificial Sequence
  Sythetic
uauuuucuaacagauucugugua

SEQ ID NO: 2641 - RNA, 24 nt, Artificial Sequence
  Sythetic
auauuuucuaacagauucugugua

SEQ ID NO: 2642 - RNA, 18 nt, Artificial Sequence
  Sythetic
gaugaguaaaagacuuua

SEQ ID NO: 2643 - RNA, 19 nt, Artificial Sequence
  Sythetic
agaugaguaaaagacuuua

SEQ ID NO: 2644 - RNA, 20 nt, Artificial Sequence
  Sythetic
gagaugaguaaaagacuuua

SEQ ID NO: 2645 - RNA, 21 nt, Artificial Sequence
  Sythetic
ugagaugaguaaaagacuuua

SEQ ID NO: 2646 - RNA, 22 nt, Artificial Sequence
  Sythetic
cugagaugaguaaaagacuuua

SEQ ID NO: 2647 - RNA, 23 nt, Artificial Sequence
  Sythetic
ucugagaugaguaaaagacuuua

SEQ ID NO: 2648 - RNA, 24 nt, Artificial Sequence
  Sythetic
uucugagaugaguaaaagacuuua

SEQ ID NO: 2649 - RNA, 18 nt, Artificial Sequence
  Sythetic
ugugagugaaagacuuua

SEQ ID NO: 2650 - RNA, 19 nt, Artificial Sequence
  Sythetic
uugugagugaaagacuuua

SEQ ID NO: 2651 - RNA, 20 nt, Artificial Sequence
  Sythetic
auugugagugaaagacuuua

SEQ ID NO: 2652 - RNA, 21 nt, Artificial Sequence
  Sythetic
gauugugagugaaagacuuua

SEQ ID NO: 2653 - RNA, 22 nt, Artificial Sequence
  Sythetic
ugauugugagugaaagacuuua

SEQ ID NO: 2654 - RNA, 23 nt, Artificial Sequence
  Sythetic
augauugugagugaaagacuuua

SEQ ID NO: 2655 - RNA, 24 nt, Artificial Sequence
  Sythetic
caugauugugagugaaagacuuua

SEQ ID NO: 2656 - RNA, 18 nt, Artificial Sequence
  Sythetic
guaaauaaaccuucagac

SEQ ID NO: 2657 - RNA, 19 nt, Artificial Sequence
  Sythetic
cguaaauaaaccuucagac

SEQ ID NO: 2658 - RNA, 20 nt, Artificial Sequence
  Sythetic
ccguaaauaaaccuucagac

SEQ ID NO: 2659 - RNA, 21 nt, Artificial Sequence
  Sythetic
cccguaaauaaaccuucagac

SEQ ID NO: 2660 - RNA, 22 nt, Artificial Sequence
  Sythetic
gcccguaaauaaaccuucagac

SEQ ID NO: 2661 - RNA, 23 nt, Artificial Sequence
  Sythetic
agcccguaaauaaaccuucagac

SEQ ID NO: 2662 - RNA, 24 nt, Artificial Sequence
  Sythetic
aagcccguaaauaaaccuucagac

SEQ ID NO: 2663 - RNA, 18 nt, Artificial Sequence
  Sythetic
gggugggauaggggauac

SEQ ID NO: 2664 - RNA, 19 nt, Artificial Sequence
  Sythetic
ggggugggauaggggauac

SEQ ID NO: 2665 - RNA, 20 nt, Artificial Sequence
  Sythetic
uggggugggauaggggauac

SEQ ID NO: 2666 - RNA, 21 nt, Artificial Sequence
  Sythetic
uuggggugggauaggggauac

SEQ ID NO: 2667 - RNA, 22 nt, Artificial Sequence
  Sythetic
guuggggugggauaggggauac

SEQ ID NO: 2668 - RNA, 23 nt, Artificial Sequence
  Sythetic
gguuggggugggauaggggauac

SEQ ID NO: 2669 - RNA, 24 nt, Artificial Sequence
  Sythetic
ggguuggggugggauaggggauac

SEQ ID NO: 2670 - RNA, 18 nt, Artificial Sequence
  Sythetic
agacauccguuccccuac

SEQ ID NO: 2671 - RNA, 19 nt, Artificial Sequence
  Sythetic
gagacauccguuccccuac

SEQ ID NO: 2672 - RNA, 20 nt, Artificial Sequence
  Sythetic
ugagacauccguuccccuac

SEQ ID NO: 2673 - RNA, 21 nt, Artificial Sequence
  Sythetic
cugagacauccguuccccuac

SEQ ID NO: 2674 - RNA, 22 nt, Artificial Sequence
  Sythetic
gcugagacauccguuccccuac

SEQ ID NO: 2675 - RNA, 23 nt, Artificial Sequence
  Sythetic
agcugagacauccguuccccuac

SEQ ID NO: 2676 - RNA, 24 nt, Artificial Sequence
  Sythetic
gagcugagacauccguuccccuac

SEQ ID NO: 2677 - RNA, 18 nt, Artificial Sequence
  Sythetic
augaguaaaagacuuuac

SEQ ID NO: 2678 - RNA, 19 nt, Artificial Sequence
  Sythetic
gaugaguaaaagacuuuac

SEQ ID NO: 2679 - RNA, 20 nt, Artificial Sequence
  Sythetic
agaugaguaaaagacuuuac

SEQ ID NO: 2680 - RNA, 21 nt, Artificial Sequence
  Sythetic
gagaugaguaaaagacuuuac

SEQ ID NO: 2681 - RNA, 22 nt, Artificial Sequence
  Sythetic
ugagaugaguaaaagacuuuac

SEQ ID NO: 2682 - RNA, 23 nt, Artificial Sequence
  Sythetic
cugagaugaguaaaagacuuuac

SEQ ID NO: 2683 - RNA, 24 nt, Artificial Sequence
  Sythetic
ucugagaugaguaaaagacuuuac

SEQ ID NO: 2684 - RNA, 18 nt, Artificial Sequence
  Sythetic
uugcacagcucaucuggc

SEQ ID NO: 2685 - RNA, 19 nt, Artificial Sequence
  Sythetic
uuugcacagcucaucuggc

SEQ ID NO: 2686 - RNA, 20 nt, Artificial Sequence
  Sythetic
auuugcacagcucaucuggc

SEQ ID NO: 2687 - RNA, 21 nt, Artificial Sequence
  Sythetic
gauuugcacagcucaucuggc

SEQ ID NO: 2688 - RNA, 22 nt, Artificial Sequence
  Sythetic
ugauuugcacagcucaucuggc

SEQ ID NO: 2689 - RNA, 23 nt, Artificial Sequence
  Sythetic
uugauuugcacagcucaucuggc

SEQ ID NO: 2690 - RNA, 24 nt, Artificial Sequence
  Sythetic
auugauuugcacagcucaucuggc

SEQ ID NO: 2691 - RNA, 18 nt, Artificial Sequence
  Sythetic
ugagucuuagcugaaauc

SEQ ID NO: 2692 - RNA, 19 nt, Artificial Sequence
  Sythetic
augagucuuagcugaaauc

SEQ ID NO: 2693 - RNA, 20 nt, Artificial Sequence
  Sythetic
gaugagucuuagcugaaauc

SEQ ID NO: 2694 - RNA, 21 nt, Artificial Sequence
  Sythetic
agaugagucuuagcugaaauc

SEQ ID NO: 2695 - RNA, 22 nt, Artificial Sequence
  Sythetic
gagaugagucuuagcugaaauc

SEQ ID NO: 2696 - RNA, 23 nt, Artificial Sequence
  Sythetic
agagaugagucuuagcugaaauc

SEQ ID NO: 2697 - RNA, 24 nt, Artificial Sequence
  Sythetic
gagagaugagucuuagcugaaauc

SEQ ID NO: 2698 - RNA, 18 nt, Artificial Sequence
  Sythetic
uaagcucaacuuaaaaag

SEQ ID NO: 2699 - RNA, 19 nt, Artificial Sequence
  Sythetic
uuaagcucaacuuaaaaag

SEQ ID NO: 2700 - RNA, 20 nt, Artificial Sequence
  Sythetic
uuuaagcucaacuuaaaaag

SEQ ID NO: 2701 - RNA, 21 nt, Artificial Sequence
  Sythetic
uuuuaagcucaacuuaaaaag

SEQ ID NO: 2702 - RNA, 22 nt, Artificial Sequence
  Sythetic
auuuuaagcucaacuuaaaaag

SEQ ID NO: 2703 - RNA, 23 nt, Artificial Sequence
  Sythetic
uauuuuaagcucaacuuaaaaag

SEQ ID NO: 2704 - RNA, 24 nt, Artificial Sequence
  Sythetic
uuauuuuaagcucaacuuaaaaag

SEQ ID NO: 2705 - RNA, 18 nt, Artificial Sequence
  Sythetic
aucuuaucuucugcuaag

SEQ ID NO: 2706 - RNA, 19 nt, Artificial Sequence
  Sythetic
aaucuuaucuucugcuaag

SEQ ID NO: 2707 - RNA, 20 nt, Artificial Sequence
  Sythetic
aaaucuuaucuucugcuaag

SEQ ID NO: 2708 - RNA, 21 nt, Artificial Sequence
  Sythetic
gaaaucuuaucuucugcuaag

SEQ ID NO: 2709 - RNA, 22 nt, Artificial Sequence
  Sythetic
ugaaaucuuaucuucugcuaag

SEQ ID NO: 2710 - RNA, 23 nt, Artificial Sequence
  Sythetic
uugaaaucuuaucuucugcuaag

SEQ ID NO: 2711 - RNA, 24 nt, Artificial Sequence
  Sythetic
cuugaaaucuuaucuucugcuaag

SEQ ID NO: 2712 - RNA, 18 nt, Artificial Sequence
  Sythetic
cacagcucaucuggccag

SEQ ID NO: 2713 - RNA, 19 nt, Artificial Sequence
  Sythetic
gcacagcucaucuggccag

SEQ ID NO: 2714 - RNA, 20 nt, Artificial Sequence
  Sythetic
ugcacagcucaucuggccag

SEQ ID NO: 2715 - RNA, 21 nt, Artificial Sequence
  Sythetic
uugcacagcucaucuggccag

SEQ ID NO: 2716 - RNA, 22 nt, Artificial Sequence
  Sythetic
uuugcacagcucaucuggccag

SEQ ID NO: 2717 - RNA, 23 nt, Artificial Sequence
  Sythetic
auuugcacagcucaucuggccag

SEQ ID NO: 2718 - RNA, 24 nt, Artificial Sequence
  Sythetic
gauuugcacagcucaucuggccag

SEQ ID NO: 2719 - RNA, 18 nt, Artificial Sequence
  Sythetic
cucaucuggccagaagag

SEQ ID NO: 2720 - RNA, 19 nt, Artificial Sequence
  Sythetic
gcucaucuggccagaagag

SEQ ID NO: 2721 - RNA, 20 nt, Artificial Sequence
  Sythetic
agcucaucuggccagaagag

SEQ ID NO: 2722 - RNA, 21 nt, Artificial Sequence
  Sythetic
cagcucaucuggccagaagag

SEQ ID NO: 2723 - RNA, 22 nt, Artificial Sequence
  Sythetic
acagcucaucuggccagaagag

SEQ ID NO: 2724 - RNA, 23 nt, Artificial Sequence
  Sythetic
cacagcucaucuggccagaagag

SEQ ID NO: 2725 - RNA, 24 nt, Artificial Sequence
  Sythetic
gcacagcucaucuggccagaagag

SEQ ID NO: 2726 - RNA, 18 nt, Artificial Sequence
  Sythetic
uaggggauacggggagag

SEQ ID NO: 2727 - RNA, 19 nt, Artificial Sequence
  Sythetic
auaggggauacggggagag

SEQ ID NO: 2728 - RNA, 20 nt, Artificial Sequence
  Sythetic
gauaggggauacggggagag

SEQ ID NO: 2729 - RNA, 21 nt, Artificial Sequence
  Sythetic
ggauaggggauacggggagag

SEQ ID NO: 2730 - RNA, 22 nt, Artificial Sequence
  Sythetic
gggauaggggauacggggagag

SEQ ID NO: 2731 - RNA, 23 nt, Artificial Sequence
  Sythetic
ugggauaggggauacggggagag

SEQ ID NO: 2732 - RNA, 24 nt, Artificial Sequence
  Sythetic
gugggauaggggauacggggagag

SEQ ID NO: 2733 - RNA, 18 nt, Artificial Sequence
  Sythetic
ucuguguagugggaugag

SEQ ID NO: 2734 - RNA, 19 nt, Artificial Sequence
  Sythetic
uucuguguagugggaugag

SEQ ID NO: 2735 - RNA, 20 nt, Artificial Sequence
  Sythetic
auucuguguagugggaugag

SEQ ID NO: 2736 - RNA, 21 nt, Artificial Sequence
  Sythetic
gauucuguguagugggaugag

SEQ ID NO: 2737 - RNA, 22 nt, Artificial Sequence
  Sythetic
agauucuguguagugggaugag

SEQ ID NO: 2738 - RNA, 23 nt, Artificial Sequence
  Sythetic
cagauucuguguagugggaugag

SEQ ID NO: 2739 - RNA, 24 nt, Artificial Sequence
  Sythetic
acagauucuguguagugggaugag

SEQ ID NO: 2740 - RNA, 18 nt, Artificial Sequence
  Sythetic
cagagagaugagucuuag

SEQ ID NO: 2741 - RNA, 19 nt, Artificial Sequence
  Sythetic
gcagagagaugagucuuag

SEQ ID NO: 2742 - RNA, 20 nt, Artificial Sequence
  Sythetic
ugcagagagaugagucuuag

SEQ ID NO: 2743 - RNA, 21 nt, Artificial Sequence
  Sythetic
uugcagagagaugagucuuag

SEQ ID NO: 2744 - RNA, 22 nt, Artificial Sequence
  Sythetic
uuugcagagagaugagucuuag

SEQ ID NO: 2745 - RNA, 23 nt, Artificial Sequence
  Sythetic
auuugcagagagaugagucuuag

SEQ ID NO: 2746 - RNA, 24 nt, Artificial Sequence
  Sythetic
gauuugcagagagaugagucuuag

SEQ ID NO: 2747 - RNA, 18 nt, Artificial Sequence
  Sythetic
ggugggauaggggauacg

SEQ ID NO: 2748 - RNA, 19 nt, Artificial Sequence
  Sythetic
gggugggauaggggauacg

SEQ ID NO: 2749 - RNA, 20 nt, Artificial Sequence
  Sythetic
ggggugggauaggggauacg

SEQ ID NO: 2750 - RNA, 21 nt, Artificial Sequence
  Sythetic
uggggugggauaggggauacg

SEQ ID NO: 2751 - RNA, 22 nt, Artificial Sequence
  Sythetic
uuggggugggauaggggauacg

SEQ ID NO: 2752 - RNA, 23 nt, Artificial Sequence
  Sythetic
guuggggugggauaggggauacg

SEQ ID NO: 2753 - RNA, 24 nt, Artificial Sequence
  Sythetic
gguuggggugggauaggggauacg

SEQ ID NO: 2754 - RNA, 18 nt, Artificial Sequence
  Sythetic
ugagcaucuguguggggg

SEQ ID NO: 2755 - RNA, 19 nt, Artificial Sequence
  Sythetic
gugagcaucuguguggggg

SEQ ID NO: 2756 - RNA, 20 nt, Artificial Sequence
  Sythetic
ggugagcaucuguguggggg

SEQ ID NO: 2757 - RNA, 21 nt, Artificial Sequence
  Sythetic
uggugagcaucuguguggggg

SEQ ID NO: 2758 - RNA, 22 nt, Artificial Sequence
  Sythetic
guggugagcaucuguguggggg

SEQ ID NO: 2759 - RNA, 23 nt, Artificial Sequence
  Sythetic
gguggugagcaucuguguggggg

SEQ ID NO: 2760 - RNA, 24 nt, Artificial Sequence
  Sythetic
ggguggugagcaucuguguggggg

SEQ ID NO: 2761 - RNA, 18 nt, Artificial Sequence
  Sythetic
cagauucuguguaguggg

SEQ ID NO: 2762 - RNA, 19 nt, Artificial Sequence
  Sythetic
acagauucuguguaguggg

SEQ ID NO: 2763 - RNA, 20 nt, Artificial Sequence
  Sythetic
aacagauucuguguaguggg

SEQ ID NO: 2764 - RNA, 21 nt, Artificial Sequence
  Sythetic
uaacagauucuguguaguggg

SEQ ID NO: 2765 - RNA, 22 nt, Artificial Sequence
  Sythetic
cuaacagauucuguguaguggg

SEQ ID NO: 2766 - RNA, 23 nt, Artificial Sequence
  Sythetic
ucuaacagauucuguguaguggg

SEQ ID NO: 2767 - RNA, 24 nt, Artificial Sequence
  Sythetic
uucuaacagauucuguguaguggg

SEQ ID NO: 2768 - RNA, 18 nt, Artificial Sequence
  Sythetic
aucuguguggggguuggg

SEQ ID NO: 2769 - RNA, 19 nt, Artificial Sequence
  Sythetic
caucuguguggggguuggg

SEQ ID NO: 2770 - RNA, 20 nt, Artificial Sequence
  Sythetic
gcaucuguguggggguuggg

SEQ ID NO: 2771 - RNA, 21 nt, Artificial Sequence
  Sythetic
agcaucuguguggggguuggg

SEQ ID NO: 2772 - RNA, 22 nt, Artificial Sequence
  Sythetic
gagcaucuguguggggguuggg

SEQ ID NO: 2773 - RNA, 23 nt, Artificial Sequence
  Sythetic
ugagcaucuguguggggguuggg

SEQ ID NO: 2774 - RNA, 24 nt, Artificial Sequence
  Sythetic
gugagcaucuguguggggguuggg

SEQ ID NO: 2775 - RNA, 18 nt, Artificial Sequence
  Sythetic
aaccuuuuagccuuacug

SEQ ID NO: 2776 - RNA, 19 nt, Artificial Sequence
  Sythetic
uaaccuuuuagccuuacug

SEQ ID NO: 2777 - RNA, 20 nt, Artificial Sequence
  Sythetic
uuaaccuuuuagccuuacug

SEQ ID NO: 2778 - RNA, 21 nt, Artificial Sequence
  Sythetic
cuuaaccuuuuagccuuacug

SEQ ID NO: 2779 - RNA, 22 nt, Artificial Sequence
  Sythetic
ucuuaaccuuuuagccuuacug

SEQ ID NO: 2780 - RNA, 23 nt, Artificial Sequence
  Sythetic
uucuuaaccuuuuagccuuacug

SEQ ID NO: 2781 - RNA, 24 nt, Artificial Sequence
  Sythetic
uuucuuaaccuuuuagccuuacug

SEQ ID NO: 2782 - RNA, 18 nt, Artificial Sequence
  Sythetic
ggggauacggggagagug

SEQ ID NO: 2783 - RNA, 19 nt, Artificial Sequence
  Sythetic
aggggauacggggagagug

SEQ ID NO: 2784 - RNA, 20 nt, Artificial Sequence
  Sythetic
uaggggauacggggagagug

SEQ ID NO: 2785 - RNA, 21 nt, Artificial Sequence
  Sythetic
auaggggauacggggagagug

SEQ ID NO: 2786 - RNA, 22 nt, Artificial Sequence
  Sythetic
gauaggggauacggggagagug

SEQ ID NO: 2787 - RNA, 23 nt, Artificial Sequence
  Sythetic
ggauaggggauacggggagagug

SEQ ID NO: 2788 - RNA, 24 nt, Artificial Sequence
  Sythetic
gggauaggggauacggggagagug

SEQ ID NO: 2789 - RNA, 18 nt, Artificial Sequence
  Sythetic
gaacaauaauauugggug

SEQ ID NO: 2790 - RNA, 19 nt, Artificial Sequence
  Sythetic
agaacaauaauauugggug

SEQ ID NO: 2791 - RNA, 20 nt, Artificial Sequence
  Sythetic
gagaacaauaauauugggug

SEQ ID NO: 2792 - RNA, 21 nt, Artificial Sequence
  Sythetic
agagaacaauaauauugggug

SEQ ID NO: 2793 - RNA, 22 nt, Artificial Sequence
  Sythetic
cagagaacaauaauauugggug

SEQ ID NO: 2794 - RNA, 23 nt, Artificial Sequence
  Sythetic
acagagaacaauaauauugggug

SEQ ID NO: 2795 - RNA, 24 nt, Artificial Sequence
  Sythetic
uacagagaacaauaauauugggug

SEQ ID NO: 2796 - RNA, 18 nt, Artificial Sequence
  Sythetic
ggguggugagcaucugug

SEQ ID NO: 2797 - RNA, 19 nt, Artificial Sequence
  Sythetic
uggguggugagcaucugug

SEQ ID NO: 2798 - RNA, 20 nt, Artificial Sequence
  Sythetic
uuggguggugagcaucugug

SEQ ID NO: 2799 - RNA, 21 nt, Artificial Sequence
  Sythetic
auuggguggugagcaucugug

SEQ ID NO: 2800 - RNA, 22 nt, Artificial Sequence
  Sythetic
uauuggguggugagcaucugug

SEQ ID NO: 2801 - RNA, 23 nt, Artificial Sequence
  Sythetic
auauuggguggugagcaucugug

SEQ ID NO: 2802 - RNA, 24 nt, Artificial Sequence
  Sythetic
aauauuggguggugagcaucugug

SEQ ID NO: 2803 - RNA, 18 nt, Artificial Sequence
  Sythetic
ucucaaaagaaagauuug

SEQ ID NO: 2804 - RNA, 19 nt, Artificial Sequence
  Sythetic
cucucaaaagaaagauuug

SEQ ID NO: 2805 - RNA, 20 nt, Artificial Sequence
  Sythetic
ccucucaaaagaaagauuug

SEQ ID NO: 2806 - RNA, 21 nt, Artificial Sequence
  Sythetic
accucucaaaagaaagauuug

SEQ ID NO: 2807 - RNA, 22 nt, Artificial Sequence
  Sythetic
uaccucucaaaagaaagauuug

SEQ ID NO: 2808 - RNA, 23 nt, Artificial Sequence
  Sythetic
uuaccucucaaaagaaagauuug

SEQ ID NO: 2809 - RNA, 24 nt, Artificial Sequence
  Sythetic
cuuaccucucaaaagaaagauuug

SEQ ID NO: 2810 - RNA, 18 nt, Artificial Sequence
  Sythetic
aauuucuuuuacuaaaau

SEQ ID NO: 2811 - RNA, 19 nt, Artificial Sequence
  Sythetic
uaauuucuuuuacuaaaau

SEQ ID NO: 2812 - RNA, 20 nt, Artificial Sequence
  Sythetic
guaauuucuuuuacuaaaau

SEQ ID NO: 2813 - RNA, 21 nt, Artificial Sequence
  Sythetic
aguaauuucuuuuacuaaaau

SEQ ID NO: 2814 - RNA, 22 nt, Artificial Sequence
  Sythetic
uaguaauuucuuuuacuaaaau

SEQ ID NO: 2815 - RNA, 23 nt, Artificial Sequence
  Sythetic
auaguaauuucuuuuacuaaaau

SEQ ID NO: 2816 - RNA, 24 nt, Artificial Sequence
  Sythetic
gauaguaauuucuuuuacuaaaau

SEQ ID NO: 2817 - RNA, 18 nt, Artificial Sequence
  Sythetic
aggggacacaggguuaau

SEQ ID NO: 2818 - RNA, 19 nt, Artificial Sequence
  Sythetic
aaggggacacaggguuaau

SEQ ID NO: 2819 - RNA, 20 nt, Artificial Sequence
  Sythetic
aaaggggacacaggguuaau

SEQ ID NO: 2820 - RNA, 21 nt, Artificial Sequence
  Sythetic
aaaaggggacacaggguuaau

SEQ ID NO: 2821 - RNA, 22 nt, Artificial Sequence
  Sythetic
aaaaaggggacacaggguuaau

SEQ ID NO: 2822 - RNA, 23 nt, Artificial Sequence
  Sythetic
gaaaaaggggacacaggguuaau

SEQ ID NO: 2823 - RNA, 24 nt, Artificial Sequence
  Sythetic
agaaaaaggggacacaggguuaau

SEQ ID NO: 2824 - RNA, 18 nt, Artificial Sequence
  Sythetic
aaauauaaucuuuaagau

SEQ ID NO: 2825 - RNA, 19 nt, Artificial Sequence
  Sythetic
aaaauauaaucuuuaagau

SEQ ID NO: 2826 - RNA, 20 nt, Artificial Sequence
  Sythetic
uaaaauauaaucuuuaagau

SEQ ID NO: 2827 - RNA, 21 nt, Artificial Sequence
  Sythetic
uuaaaauauaaucuuuaagau

SEQ ID NO: 2828 - RNA, 22 nt, Artificial Sequence
  Sythetic
cuuaaaauauaaucuuuaagau

SEQ ID NO: 2829 - RNA, 23 nt, Artificial Sequence
  Sythetic
ucuuaaaauauaaucuuuaagau

SEQ ID NO: 2830 - RNA, 24 nt, Artificial Sequence
  Sythetic
aucuuaaaauauaaucuuuaagau

SEQ ID NO: 2831 - RNA, 18 nt, Artificial Sequence
  Sythetic
uggggugggauaggggau

SEQ ID NO: 2832 - RNA, 19 nt, Artificial Sequence
  Sythetic
uuggggugggauaggggau

SEQ ID NO: 2833 - RNA, 20 nt, Artificial Sequence
  Sythetic
guuggggugggauaggggau

SEQ ID NO: 2834 - RNA, 21 nt, Artificial Sequence
  Sythetic
gguuggggugggauaggggau

SEQ ID NO: 2835 - RNA, 22 nt, Artificial Sequence
  Sythetic
ggguuggggugggauaggggau

SEQ ID NO: 2836 - RNA, 23 nt, Artificial Sequence
  Sythetic
gggguuggggugggauaggggau

SEQ ID NO: 2837 - RNA, 24 nt, Artificial Sequence
  Sythetic
ggggguuggggugggauaggggau

SEQ ID NO: 2838 - RNA, 18 nt, Artificial Sequence
  Sythetic
uggggguuggggugggau

SEQ ID NO: 2839 - RNA, 19 nt, Artificial Sequence
  Sythetic
guggggguuggggugggau

SEQ ID NO: 2840 - RNA, 20 nt, Artificial Sequence
  Sythetic
uguggggguuggggugggau

SEQ ID NO: 2841 - RNA, 21 nt, Artificial Sequence
  Sythetic
guguggggguuggggugggau

SEQ ID NO: 2842 - RNA, 22 nt, Artificial Sequence
  Sythetic
uguguggggguuggggugggau

SEQ ID NO: 2843 - RNA, 23 nt, Artificial Sequence
  Sythetic
cuguguggggguuggggugggau

SEQ ID NO: 2844 - RNA, 24 nt, Artificial Sequence
  Sythetic
ucuguguggggguuggggugggau

SEQ ID NO: 2845 - RNA, 18 nt, Artificial Sequence
  Sythetic
gaaaucuuaucuucugcu

SEQ ID NO: 2846 - RNA, 19 nt, Artificial Sequence
  Sythetic
ugaaaucuuaucuucugcu

SEQ ID NO: 2847 - RNA, 20 nt, Artificial Sequence
  Sythetic
uugaaaucuuaucuucugcu

SEQ ID NO: 2848 - RNA, 21 nt, Artificial Sequence
  Sythetic
cuugaaaucuuaucuucugcu

SEQ ID NO: 2849 - RNA, 22 nt, Artificial Sequence
  Sythetic
ucuugaaaucuuaucuucugcu

SEQ ID NO: 2850 - RNA, 23 nt, Artificial Sequence
  Sythetic
aucuugaaaucuuaucuucugcu

SEQ ID NO: 2851 - RNA, 24 nt, Artificial Sequence
  Sythetic
aaucuugaaaucuuaucuucugcu

SEQ ID NO: 2852 - RNA, 18 nt, Artificial Sequence
  Sythetic
uaaggaaagggucacagu

SEQ ID NO: 2853 - RNA, 19 nt, Artificial Sequence
  Sythetic
auaaggaaagggucacagu

SEQ ID NO: 2854 - RNA, 20 nt, Artificial Sequence
  Sythetic
gauaaggaaagggucacagu

SEQ ID NO: 2855 - RNA, 21 nt, Artificial Sequence
  Sythetic
agauaaggaaagggucacagu

SEQ ID NO: 2856 - RNA, 22 nt, Artificial Sequence
  Sythetic
aagauaaggaaagggucacagu

SEQ ID NO: 2857 - RNA, 23 nt, Artificial Sequence
  Sythetic
uaagauaaggaaagggucacagu

SEQ ID NO: 2858 - RNA, 24 nt, Artificial Sequence
  Sythetic
uuaagauaaggaaagggucacagu

SEQ ID NO: 2859 - RNA, 18 nt, Artificial Sequence
  Sythetic
aaaacaaaauaauccagu

SEQ ID NO: 2860 - RNA, 19 nt, Artificial Sequence
  Sythetic
aaaaacaaaauaauccagu

SEQ ID NO: 2861 - RNA, 20 nt, Artificial Sequence
  Sythetic
caaaaacaaaauaauccagu

SEQ ID NO: 2862 - RNA, 21 nt, Artificial Sequence
  Sythetic
acaaaaacaaaauaauccagu

SEQ ID NO: 2863 - RNA, 22 nt, Artificial Sequence
  Sythetic
aacaaaaacaaaauaauccagu

SEQ ID NO: 2864 - RNA, 23 nt, Artificial Sequence
  Sythetic
gaacaaaaacaaaauaauccagu

SEQ ID NO: 2865 - RNA, 24 nt, Artificial Sequence
  Sythetic
agaacaaaaacaaaauaauccagu

SEQ ID NO: 2866 - RNA, 18 nt, Artificial Sequence
  Sythetic
uggguggugagcaucugu

SEQ ID NO: 2867 - RNA, 19 nt, Artificial Sequence
  Sythetic
uuggguggugagcaucugu

SEQ ID NO: 2868 - RNA, 20 nt, Artificial Sequence
  Sythetic
auuggguggugagcaucugu

SEQ ID NO: 2869 - RNA, 21 nt, Artificial Sequence
  Sythetic
uauuggguggugagcaucugu

SEQ ID NO: 2870 - RNA, 22 nt, Artificial Sequence
  Sythetic
auauuggguggugagcaucugu

SEQ ID NO: 2871 - RNA, 23 nt, Artificial Sequence
  Sythetic
aauauuggguggugagcaucugu

SEQ ID NO: 2872 - RNA, 24 nt, Artificial Sequence
  Sythetic
uaauauuggguggugagcaucugu

SEQ ID NO: 2873 - RNA, 18 nt, Artificial Sequence
  Sythetic
uggccuguuaguuagcuu

SEQ ID NO: 2874 - RNA, 19 nt, Artificial Sequence
  Sythetic
uuggccuguuaguuagcuu

SEQ ID NO: 2875 - RNA, 20 nt, Artificial Sequence
  Sythetic
cuuggccuguuaguuagcuu

SEQ ID NO: 2876 - RNA, 21 nt, Artificial Sequence
  Sythetic
gcuuggccuguuaguuagcuu

SEQ ID NO: 2877 - RNA, 22 nt, Artificial Sequence
  Sythetic
ugcuuggccuguuaguuagcuu

SEQ ID NO: 2878 - RNA, 23 nt, Artificial Sequence
  Sythetic
cugcuuggccuguuaguuagcuu

SEQ ID NO: 2879 - RNA, 24 nt, Artificial Sequence
  Sythetic
gcugcuuggccuguuaguuagcuu

SEQ ID NO: 2880 - RNA, 18 nt, Artificial Sequence
  Sythetic
gggcaacaaaauagugaa

SEQ ID NO: 2881 - RNA, 19 nt, Artificial Sequence
  Sythetic
agggcaacaaaauagugaa

SEQ ID NO: 2882 - RNA, 20 nt, Artificial Sequence
  Sythetic
aagggcaacaaaauagugaa

SEQ ID NO: 2883 - RNA, 21 nt, Artificial Sequence
  Sythetic
gaagggcaacaaaauagugaa

SEQ ID NO: 2884 - RNA, 22 nt, Artificial Sequence
  Sythetic
ugaagggcaacaaaauagugaa

SEQ ID NO: 2885 - RNA, 23 nt, Artificial Sequence
  Sythetic
uugaagggcaacaaaauagugaa

SEQ ID NO: 2886 - RNA, 24 nt, Artificial Sequence
  Sythetic
uuugaagggcaacaaaauagugaa

SEQ ID NO: 2887 - RNA, 18 nt, Artificial Sequence
  Sythetic
uuuuaauuuugaaccaua

SEQ ID NO: 2888 - RNA, 19 nt, Artificial Sequence
  Sythetic
uuuuuaauuuugaaccaua

SEQ ID NO: 2889 - RNA, 20 nt, Artificial Sequence
  Sythetic
auuuuuaauuuugaaccaua

SEQ ID NO: 2890 - RNA, 21 nt, Artificial Sequence
  Sythetic
cauuuuuaauuuugaaccaua

SEQ ID NO: 2891 - RNA, 22 nt, Artificial Sequence
  Sythetic
ucauuuuuaauuuugaaccaua

SEQ ID NO: 2892 - RNA, 23 nt, Artificial Sequence
  Sythetic
cucauuuuuaauuuugaaccaua

SEQ ID NO: 2893 - RNA, 24 nt, Artificial Sequence
  Sythetic
gcucauuuuuaauuuugaaccaua

SEQ ID NO: 2894 - RNA, 18 nt, Artificial Sequence
  Sythetic
aaaauccccacuaagauc

SEQ ID NO: 2895 - RNA, 19 nt, Artificial Sequence
  Sythetic
gaaaauccccacuaagauc

SEQ ID NO: 2896 - RNA, 20 nt, Artificial Sequence
  Sythetic
ugaaaauccccacuaagauc

SEQ ID NO: 2897 - RNA, 21 nt, Artificial Sequence
  Sythetic
gugaaaauccccacuaagauc

SEQ ID NO: 2898 - RNA, 22 nt, Artificial Sequence
  Sythetic
agugaaaauccccacuaagauc

SEQ ID NO: 2899 - RNA, 23 nt, Artificial Sequence
  Sythetic
gagugaaaauccccacuaagauc

SEQ ID NO: 2900 - RNA, 24 nt, Artificial Sequence
  Sythetic
agagugaaaauccccacuaagauc

SEQ ID NO: 2901 - RNA, 18 nt, Artificial Sequence
  Sythetic
cuucagauagauuauauc

SEQ ID NO: 2902 - RNA, 19 nt, Artificial Sequence
  Sythetic
gcuucagauagauuauauc

SEQ ID NO: 2903 - RNA, 20 nt, Artificial Sequence
  Sythetic
agcuucagauagauuauauc

SEQ ID NO: 2904 - RNA, 21 nt, Artificial Sequence
  Sythetic
uagcuucagauagauuauauc

SEQ ID NO: 2905 - RNA, 22 nt, Artificial Sequence
  Sythetic
auagcuucagauagauuauauc

SEQ ID NO: 2906 - RNA, 23 nt, Artificial Sequence
  Sythetic
cauagcuucagauagauuauauc

SEQ ID NO: 2907 - RNA, 24 nt, Artificial Sequence
  Sythetic
ucauagcuucagauagauuauauc

SEQ ID NO: 2908 - RNA, 18 nt, Artificial Sequence
  Sythetic
gagggcaucuuguggcuc

SEQ ID NO: 2909 - RNA, 19 nt, Artificial Sequence
  Sythetic
agagggcaucuuguggcuc

SEQ ID NO: 2910 - RNA, 20 nt, Artificial Sequence
  Sythetic
cagagggcaucuuguggcuc

SEQ ID NO: 2911 - RNA, 21 nt, Artificial Sequence
  Sythetic
ccagagggcaucuuguggcuc

SEQ ID NO: 2912 - RNA, 22 nt, Artificial Sequence
  Sythetic
cccagagggcaucuuguggcuc

SEQ ID NO: 2913 - RNA, 23 nt, Artificial Sequence
  Sythetic
gcccagagggcaucuuguggcuc

SEQ ID NO: 2914 - RNA, 24 nt, Artificial Sequence
  Sythetic
agcccagagggcaucuuguggcuc

SEQ ID NO: 2915 - RNA, 18 nt, Artificial Sequence
  Sythetic
uuucgucugccaccacag

SEQ ID NO: 2916 - RNA, 19 nt, Artificial Sequence
  Sythetic
guuucgucugccaccacag

SEQ ID NO: 2917 - RNA, 20 nt, Artificial Sequence
  Sythetic
uguuucgucugccaccacag

SEQ ID NO: 2918 - RNA, 21 nt, Artificial Sequence
  Sythetic
auguuucgucugccaccacag

SEQ ID NO: 2919 - RNA, 22 nt, Artificial Sequence
  Sythetic
aauguuucgucugccaccacag

SEQ ID NO: 2920 - RNA, 23 nt, Artificial Sequence
  Sythetic
aaauguuucgucugccaccacag

SEQ ID NO: 2921 - RNA, 24 nt, Artificial Sequence
  Sythetic
aaaauguuucgucugccaccacag

SEQ ID NO: 2922 - RNA, 18 nt, Artificial Sequence
  Sythetic
uagauuauaucuggagug

SEQ ID NO: 2923 - RNA, 19 nt, Artificial Sequence
  Sythetic
auagauuauaucuggagug

SEQ ID NO: 2924 - RNA, 20 nt, Artificial Sequence
  Sythetic
gauagauuauaucuggagug

SEQ ID NO: 2925 - RNA, 21 nt, Artificial Sequence
  Sythetic
agauagauuauaucuggagug

SEQ ID NO: 2926 - RNA, 22 nt, Artificial Sequence
  Sythetic
cagauagauuauaucuggagug

SEQ ID NO: 2927 - RNA, 23 nt, Artificial Sequence
  Sythetic
ucagauagauuauaucuggagug

SEQ ID NO: 2928 - RNA, 24 nt, Artificial Sequence
  Sythetic
uucagauagauuauaucuggagug

SEQ ID NO: 2929 - RNA, 18 nt, Artificial Sequence
  Sythetic
uuucucuuauuaaacccu

SEQ ID NO: 2930 - RNA, 19 nt, Artificial Sequence
  Sythetic
uuuucucuuauuaaacccu

SEQ ID NO: 2931 - RNA, 20 nt, Artificial Sequence
  Sythetic
auuuucucuuauuaaacccu

SEQ ID NO: 2932 - RNA, 21 nt, Artificial Sequence
  Sythetic
aauuuucucuuauuaaacccu

SEQ ID NO: 2933 - RNA, 22 nt, Artificial Sequence
  Sythetic
gaauuuucucuuauuaaacccu

SEQ ID NO: 2934 - RNA, 23 nt, Artificial Sequence
  Sythetic
agaauuuucucuuauuaaacccu

SEQ ID NO: 2935 - RNA, 24 nt, Artificial Sequence
  Sythetic
gagaauuuucucuuauuaaacccu

SEQ ID NO: 2936 - RNA, 18 nt, Artificial Sequence
  Sythetic
aguucagcugcucuagcu

SEQ ID NO: 2937 - RNA, 19 nt, Artificial Sequence
  Sythetic
aaguucagcugcucuagcu

SEQ ID NO: 2938 - RNA, 20 nt, Artificial Sequence
  Sythetic
uaaguucagcugcucuagcu

SEQ ID NO: 2939 - RNA, 21 nt, Artificial Sequence
  Sythetic
uuaaguucagcugcucuagcu

SEQ ID NO: 2940 - RNA, 22 nt, Artificial Sequence
  Sythetic
uuuaaguucagcugcucuagcu

SEQ ID NO: 2941 - RNA, 23 nt, Artificial Sequence
  Sythetic
auuuaaguucagcugcucuagcu

SEQ ID NO: 2942 - RNA, 24 nt, Artificial Sequence
  Sythetic
uauuuaaguucagcugcucuagcu

SEQ ID NO: 2943 - RNA, 18 nt, Artificial Sequence
  Sythetic
cuauguaucuggcauagu

SEQ ID NO: 2944 - RNA, 19 nt, Artificial Sequence
  Sythetic
ccuauguaucuggcauagu

SEQ ID NO: 2945 - RNA, 20 nt, Artificial Sequence
  Sythetic
accuauguaucuggcauagu

SEQ ID NO: 2946 - RNA, 21 nt, Artificial Sequence
  Sythetic
caccuauguaucuggcauagu

SEQ ID NO: 2947 - RNA, 22 nt, Artificial Sequence
  Sythetic
ccaccuauguaucuggcauagu

SEQ ID NO: 2948 - RNA, 23 nt, Artificial Sequence
  Sythetic
gccaccuauguaucuggcauagu

SEQ ID NO: 2949 - RNA, 24 nt, Artificial Sequence
  Sythetic
ugccaccuauguaucuggcauagu

SEQ ID NO: 2950 - RNA, 18 nt, Artificial Sequence
  Sythetic
uucugaguugccacaauu

SEQ ID NO: 2951 - RNA, 19 nt, Artificial Sequence
  Sythetic
uuucugaguugccacaauu

SEQ ID NO: 2952 - RNA, 20 nt, Artificial Sequence
  Sythetic
guuucugaguugccacaauu

SEQ ID NO: 2953 - RNA, 21 nt, Artificial Sequence
  Sythetic
aguuucugaguugccacaauu

SEQ ID NO: 2954 - RNA, 22 nt, Artificial Sequence
  Sythetic
uaguuucugaguugccacaauu

SEQ ID NO: 2955 - RNA, 23 nt, Artificial Sequence
  Sythetic
guaguuucugaguugccacaauu

SEQ ID NO: 2956 - RNA, 24 nt, Artificial Sequence
  Sythetic
uguaguuucugaguugccacaauu

SEQ ID NO: 2957 - RNA, 18 nt, Artificial Sequence
  Sythetic
agaugaaugucaugcauu

SEQ ID NO: 2958 - RNA, 19 nt, Artificial Sequence
  Sythetic
cagaugaaugucaugcauu

SEQ ID NO: 2959 - RNA, 20 nt, Artificial Sequence
  Sythetic
acagaugaaugucaugcauu

SEQ ID NO: 2960 - RNA, 21 nt, Artificial Sequence
  Sythetic
cacagaugaaugucaugcauu

SEQ ID NO: 2961 - RNA, 22 nt, Artificial Sequence
  Sythetic
ccacagaugaaugucaugcauu

SEQ ID NO: 2962 - RNA, 23 nt, Artificial Sequence
  Sythetic
accacagaugaaugucaugcauu

SEQ ID NO: 2963 - RNA, 24 nt, Artificial Sequence
  Sythetic
caccacagaugaaugucaugcauu

SEQ ID NO: 2964 - RNA, 18 nt, Artificial Sequence
  Sythetic
gcacguaauuuugcuguu

SEQ ID NO: 2965 - RNA, 19 nt, Artificial Sequence
  Sythetic
ggcacguaauuuugcuguu

SEQ ID NO: 2966 - RNA, 20 nt, Artificial Sequence
  Sythetic
gggcacguaauuuugcuguu

SEQ ID NO: 2967 - RNA, 21 nt, Artificial Sequence
  Sythetic
ggggcacguaauuuugcuguu

SEQ ID NO: 2968 - RNA, 22 nt, Artificial Sequence
  Sythetic
gggggcacguaauuuugcuguu

SEQ ID NO: 2969 - RNA, 23 nt, Artificial Sequence
  Sythetic
ugggggcacguaauuuugcuguu

SEQ ID NO: 2970 - RNA, 24 nt, Artificial Sequence
  Sythetic
uugggggcacguaauuuugcuguu

SEQ ID NO: 2971 - RNA, 18 nt, Artificial Sequence
  Sythetic
aguuuguguuuguaguuu

SEQ ID NO: 2972 - RNA, 19 nt, Artificial Sequence
  Sythetic
aaguuuguguuuguaguuu

SEQ ID NO: 2973 - RNA, 20 nt, Artificial Sequence
  Sythetic
gaaguuuguguuuguaguuu

SEQ ID NO: 2974 - RNA, 21 nt, Artificial Sequence
  Sythetic
ugaaguuuguguuuguaguuu

SEQ ID NO: 2975 - RNA, 22 nt, Artificial Sequence
  Sythetic
gugaaguuuguguuuguaguuu

SEQ ID NO: 2976 - RNA, 23 nt, Artificial Sequence
  Sythetic
ugugaaguuuguguuuguaguuu

SEQ ID NO: 2977 - RNA, 24 nt, Artificial Sequence
  Sythetic
cugugaaguuuguguuuguaguuu

SEQ ID NO: 2978 - RNA, 18 nt, Artificial Sequence
  Sythetic
ugccuagucuaaggugca

SEQ ID NO: 2979 - RNA, 19 nt, Artificial Sequence
  Sythetic
cugccuagucuaaggugca

SEQ ID NO: 2980 - RNA, 20 nt, Artificial Sequence
  Sythetic
gcugccuagucuaaggugca

SEQ ID NO: 2981 - RNA, 21 nt, Artificial Sequence
  Sythetic
agcugccuagucuaaggugca

SEQ ID NO: 2982 - RNA, 22 nt, Artificial Sequence
  Sythetic
cagcugccuagucuaaggugca

SEQ ID NO: 2983 - RNA, 23 nt, Artificial Sequence
  Sythetic
ucagcugccuagucuaaggugca

SEQ ID NO: 2984 - RNA, 24 nt, Artificial Sequence
  Sythetic
cucagcugccuagucuaaggugca

SEQ ID NO: 2985 - RNA, 18 nt, Artificial Sequence
  Sythetic
cagggaguuugagacuca

SEQ ID NO: 2986 - RNA, 19 nt, Artificial Sequence
  Sythetic
gcagggaguuugagacuca

SEQ ID NO: 2987 - RNA, 20 nt, Artificial Sequence
  Sythetic
ugcagggaguuugagacuca

SEQ ID NO: 2988 - RNA, 21 nt, Artificial Sequence
  Sythetic
gugcagggaguuugagacuca

SEQ ID NO: 2989 - RNA, 22 nt, Artificial Sequence
  Sythetic
ggugcagggaguuugagacuca

SEQ ID NO: 2990 - RNA, 23 nt, Artificial Sequence
  Sythetic
aggugcagggaguuugagacuca

SEQ ID NO: 2991 - RNA, 24 nt, Artificial Sequence
  Sythetic
aaggugcagggaguuugagacuca

SEQ ID NO: 2992 - RNA, 18 nt, Artificial Sequence
  Sythetic
cccaucuuuuucuggacc

SEQ ID NO: 2993 - RNA, 19 nt, Artificial Sequence
  Sythetic
ucccaucuuuuucuggacc

SEQ ID NO: 2994 - RNA, 20 nt, Artificial Sequence
  Sythetic
uucccaucuuuuucuggacc

SEQ ID NO: 2995 - RNA, 21 nt, Artificial Sequence
  Sythetic
uuucccaucuuuuucuggacc

SEQ ID NO: 2996 - RNA, 22 nt, Artificial Sequence
  Sythetic
guuucccaucuuuuucuggacc

SEQ ID NO: 2997 - RNA, 23 nt, Artificial Sequence
  Sythetic
gguuucccaucuuuuucuggacc

SEQ ID NO: 2998 - RNA, 24 nt, Artificial Sequence
  Sythetic
agguuucccaucuuuuucuggacc

SEQ ID NO: 2999 - RNA, 18 nt, Artificial Sequence
  Sythetic
uuauaagacuaaacuacc

SEQ ID NO: 3000 - RNA, 19 nt, Artificial Sequence
  Sythetic
guuauaagacuaaacuacc

SEQ ID NO: 3001 - RNA, 20 nt, Artificial Sequence
  Sythetic
gguuauaagacuaaacuacc

SEQ ID NO: 3002 - RNA, 21 nt, Artificial Sequence
  Sythetic
ugguuauaagacuaaacuacc

SEQ ID NO: 3003 - RNA, 22 nt, Artificial Sequence
  Sythetic
cugguuauaagacuaaacuacc

SEQ ID NO: 3004 - RNA, 23 nt, Artificial Sequence
  Sythetic
gcugguuauaagacuaaacuacc

SEQ ID NO: 3005 - RNA, 24 nt, Artificial Sequence
  Sythetic
agcugguuauaagacuaaacuacc

SEQ ID NO: 3006 - RNA, 18 nt, Artificial Sequence
  Sythetic
aguuuuaacuaugggcuc

SEQ ID NO: 3007 - RNA, 19 nt, Artificial Sequence
  Sythetic
gaguuuuaacuaugggcuc

SEQ ID NO: 3008 - RNA, 20 nt, Artificial Sequence
  Sythetic
agaguuuuaacuaugggcuc

SEQ ID NO: 3009 - RNA, 21 nt, Artificial Sequence
  Sythetic
aagaguuuuaacuaugggcuc

SEQ ID NO: 3010 - RNA, 22 nt, Artificial Sequence
  Sythetic
aaagaguuuuaacuaugggcuc

SEQ ID NO: 3011 - RNA, 23 nt, Artificial Sequence
  Sythetic
uaaagaguuuuaacuaugggcuc

SEQ ID NO: 3012 - RNA, 24 nt, Artificial Sequence
  Sythetic
cuaaagaguuuuaacuaugggcuc

SEQ ID NO: 3013 - RNA, 18 nt, Artificial Sequence
  Sythetic
cuuccgugaccuuggcuc

SEQ ID NO: 3014 - RNA, 19 nt, Artificial Sequence
  Sythetic
gcuuccgugaccuuggcuc

SEQ ID NO: 3015 - RNA, 20 nt, Artificial Sequence
  Sythetic
ggcuuccgugaccuuggcuc

SEQ ID NO: 3016 - RNA, 21 nt, Artificial Sequence
  Sythetic
gggcuuccgugaccuuggcuc

SEQ ID NO: 3017 - RNA, 22 nt, Artificial Sequence
  Sythetic
ugggcuuccgugaccuuggcuc

SEQ ID NO: 3018 - RNA, 23 nt, Artificial Sequence
  Sythetic
cugggcuuccgugaccuuggcuc

SEQ ID NO: 3019 - RNA, 24 nt, Artificial Sequence
  Sythetic
ucugggcuuccgugaccuuggcuc

SEQ ID NO: 3020 - RNA, 18 nt, Artificial Sequence
  Sythetic
uuuuuauuauauuauuuc

SEQ ID NO: 3021 - RNA, 19 nt, Artificial Sequence
  Sythetic
uuuuuuauuauauuauuuc

SEQ ID NO: 3022 - RNA, 20 nt, Artificial Sequence
  Sythetic
auuuuuuauuauauuauuuc

SEQ ID NO: 3023 - RNA, 21 nt, Artificial Sequence
  Sythetic
cauuuuuuauuauauuauuuc

SEQ ID NO: 3024 - RNA, 22 nt, Artificial Sequence
  Sythetic
acauuuuuuauuauauuauuuc

SEQ ID NO: 3025 - RNA, 23 nt, Artificial Sequence
  Sythetic
aacauuuuuuauuauauuauuuc

SEQ ID NO: 3026 - RNA, 24 nt, Artificial Sequence
  Sythetic
aaacauuuuuuauuauauuauuuc

SEQ ID NO: 3027 - RNA, 18 nt, Artificial Sequence
  Sythetic
ugccagauacauaggugg

SEQ ID NO: 3028 - RNA, 19 nt, Artificial Sequence
  Sythetic
augccagauacauaggugg

SEQ ID NO: 3029 - RNA, 20 nt, Artificial Sequence
  Sythetic
uaugccagauacauaggugg

SEQ ID NO: 3030 - RNA, 21 nt, Artificial Sequence
  Sythetic
cuaugccagauacauaggugg

SEQ ID NO: 3031 - RNA, 22 nt, Artificial Sequence
  Sythetic
acuaugccagauacauaggugg

SEQ ID NO: 3032 - RNA, 23 nt, Artificial Sequence
  Sythetic
cacuaugccagauacauaggugg

SEQ ID NO: 3033 - RNA, 24 nt, Artificial Sequence
  Sythetic
acacuaugccagauacauaggugg

SEQ ID NO: 3034 - RNA, 18 nt, Artificial Sequence
  Sythetic
uggacccaggaucuuagu

SEQ ID NO: 3035 - RNA, 19 nt, Artificial Sequence
  Sythetic
cuggacccaggaucuuagu

SEQ ID NO: 3036 - RNA, 20 nt, Artificial Sequence
  Sythetic
ucuggacccaggaucuuagu

SEQ ID NO: 3037 - RNA, 21 nt, Artificial Sequence
  Sythetic
uucuggacccaggaucuuagu

SEQ ID NO: 3038 - RNA, 22 nt, Artificial Sequence
  Sythetic
uuucuggacccaggaucuuagu

SEQ ID NO: 3039 - RNA, 23 nt, Artificial Sequence
  Sythetic
uuuucuggacccaggaucuuagu

SEQ ID NO: 3040 - RNA, 24 nt, Artificial Sequence
  Sythetic
uuuuucuggacccaggaucuuagu

SEQ ID NO: 3041 - RNA, 18 nt, Artificial Sequence
  Sythetic
aaacuucacagaaaaugu

SEQ ID NO: 3042 - RNA, 19 nt, Artificial Sequence
  Sythetic
caaacuucacagaaaaugu

SEQ ID NO: 3043 - RNA, 20 nt, Artificial Sequence
  Sythetic
acaaacuucacagaaaaugu

SEQ ID NO: 3044 - RNA, 21 nt, Artificial Sequence
  Sythetic
cacaaacuucacagaaaaugu

SEQ ID NO: 3045 - RNA, 22 nt, Artificial Sequence
  Sythetic
acacaaacuucacagaaaaugu

SEQ ID NO: 3046 - RNA, 23 nt, Artificial Sequence
  Sythetic
aacacaaacuucacagaaaaugu

SEQ ID NO: 3047 - RNA, 24 nt, Artificial Sequence
  Sythetic
aaacacaaacuucacagaaaaugu

SEQ ID NO: 3048 - RNA, 18 nt, Artificial Sequence
  Sythetic
uggaggaaaaagaaaaaa

SEQ ID NO: 3049 - RNA, 19 nt, Artificial Sequence
  Sythetic
cuggaggaaaaagaaaaaa

SEQ ID NO: 3050 - RNA, 20 nt, Artificial Sequence
  Sythetic
ucuggaggaaaaagaaaaaa

SEQ ID NO: 3051 - RNA, 21 nt, Artificial Sequence
  Sythetic
gucuggaggaaaaagaaaaaa

SEQ ID NO: 3052 - RNA, 22 nt, Artificial Sequence
  Sythetic
ugucuggaggaaaaagaaaaaa

SEQ ID NO: 3053 - RNA, 23 nt, Artificial Sequence
  Sythetic
uugucuggaggaaaaagaaaaaa

SEQ ID NO: 3054 - RNA, 24 nt, Artificial Sequence
  Sythetic
cuugucuggaggaaaaagaaaaaa

SEQ ID NO: 3055 - RNA, 18 nt, Artificial Sequence
  Sythetic
ucuggaggaaaaagaaaa

SEQ ID NO: 3056 - RNA, 19 nt, Artificial Sequence
  Sythetic
gucuggaggaaaaagaaaa

SEQ ID NO: 3057 - RNA, 20 nt, Artificial Sequence
  Sythetic
ugucuggaggaaaaagaaaa

SEQ ID NO: 3058 - RNA, 21 nt, Artificial Sequence
  Sythetic
uugucuggaggaaaaagaaaa

SEQ ID NO: 3059 - RNA, 22 nt, Artificial Sequence
  Sythetic
cuugucuggaggaaaaagaaaa

SEQ ID NO: 3060 - RNA, 23 nt, Artificial Sequence
  Sythetic
ucuugucuggaggaaaaagaaaa

SEQ ID NO: 3061 - RNA, 24 nt, Artificial Sequence
  Sythetic
cucuugucuggaggaaaaagaaaa

SEQ ID NO: 3062 - RNA, 18 nt, Artificial Sequence
  Sythetic
ccucuugucuggaggaaa

SEQ ID NO: 3063 - RNA, 19 nt, Artificial Sequence
  Sythetic
cccucuugucuggaggaaa

SEQ ID NO: 3064 - RNA, 20 nt, Artificial Sequence
  Sythetic
ucccucuugucuggaggaaa

SEQ ID NO: 3065 - RNA, 21 nt, Artificial Sequence
  Sythetic
uucccucuugucuggaggaaa

SEQ ID NO: 3066 - RNA, 22 nt, Artificial Sequence
  Sythetic
cuucccucuugucuggaggaaa

SEQ ID NO: 3067 - RNA, 23 nt, Artificial Sequence
  Sythetic
gcuucccucuugucuggaggaaa

SEQ ID NO: 3068 - RNA, 24 nt, Artificial Sequence
  Sythetic
ggcuucccucuugucuggaggaaa

SEQ ID NO: 3069 - RNA, 18 nt, Artificial Sequence
  Sythetic
gaugucaccaaccgccaa

SEQ ID NO: 3070 - RNA, 19 nt, Artificial Sequence
  Sythetic
agaugucaccaaccgccaa

SEQ ID NO: 3071 - RNA, 20 nt, Artificial Sequence
  Sythetic
cagaugucaccaaccgccaa

SEQ ID NO: 3072 - RNA, 21 nt, Artificial Sequence
  Sythetic
ucagaugucaccaaccgccaa

SEQ ID NO: 3073 - RNA, 22 nt, Artificial Sequence
  Sythetic
uucagaugucaccaaccgccaa

SEQ ID NO: 3074 - RNA, 23 nt, Artificial Sequence
  Sythetic
uuucagaugucaccaaccgccaa

SEQ ID NO: 3075 - RNA, 24 nt, Artificial Sequence
  Sythetic
uuuucagaugucaccaaccgccaa

SEQ ID NO: 3076 - RNA, 18 nt, Artificial Sequence
  Sythetic
caaggucacggaagccca

SEQ ID NO: 3077 - RNA, 19 nt, Artificial Sequence
  Sythetic
ccaaggucacggaagccca

SEQ ID NO: 3078 - RNA, 20 nt, Artificial Sequence
  Sythetic
gccaaggucacggaagccca

SEQ ID NO: 3079 - RNA, 21 nt, Artificial Sequence
  Sythetic
agccaaggucacggaagccca

SEQ ID NO: 3080 - RNA, 22 nt, Artificial Sequence
  Sythetic
gagccaaggucacggaagccca

SEQ ID NO: 3081 - RNA, 23 nt, Artificial Sequence
  Sythetic
agagccaaggucacggaagccca

SEQ ID NO: 3082 - RNA, 24 nt, Artificial Sequence
  Sythetic
uagagccaaggucacggaagccca

SEQ ID NO: 3083 - RNA, 18 nt, Artificial Sequence
  Sythetic
auucuagagccaagguca

SEQ ID NO: 3084 - RNA, 19 nt, Artificial Sequence
  Sythetic
uauucuagagccaagguca

SEQ ID NO: 3085 - RNA, 20 nt, Artificial Sequence
  Sythetic
uuauucuagagccaagguca

SEQ ID NO: 3086 - RNA, 21 nt, Artificial Sequence
  Sythetic
uuuauucuagagccaagguca

SEQ ID NO: 3087 - RNA, 22 nt, Artificial Sequence
  Sythetic
uuuuauucuagagccaagguca

SEQ ID NO: 3088 - RNA, 23 nt, Artificial Sequence
  Sythetic
uuuuuauucuagagccaagguca

SEQ ID NO: 3089 - RNA, 24 nt, Artificial Sequence
  Sythetic
cuuuuuauucuagagccaagguca

SEQ ID NO: 3090 - RNA, 18 nt, Artificial Sequence
  Sythetic
ccuggguccagaaaaaga

SEQ ID NO: 3091 - RNA, 19 nt, Artificial Sequence
  Sythetic
uccuggguccagaaaaaga

SEQ ID NO: 3092 - RNA, 20 nt, Artificial Sequence
  Sythetic
auccuggguccagaaaaaga

SEQ ID NO: 3093 - RNA, 21 nt, Artificial Sequence
  Sythetic
gauccuggguccagaaaaaga

SEQ ID NO: 3094 - RNA, 22 nt, Artificial Sequence
  Sythetic
agauccuggguccagaaaaaga

SEQ ID NO: 3095 - RNA, 23 nt, Artificial Sequence
  Sythetic
aagauccuggguccagaaaaaga

SEQ ID NO: 3096 - RNA, 24 nt, Artificial Sequence
  Sythetic
uaagauccuggguccagaaaaaga

SEQ ID NO: 3097 - RNA, 18 nt, Artificial Sequence
  Sythetic
aacaaaauagugaacaga

SEQ ID NO: 3098 - RNA, 19 nt, Artificial Sequence
  Sythetic
caacaaaauagugaacaga

SEQ ID NO: 3099 - RNA, 20 nt, Artificial Sequence
  Sythetic
gcaacaaaauagugaacaga

SEQ ID NO: 3100 - RNA, 21 nt, Artificial Sequence
  Sythetic
ggcaacaaaauagugaacaga

SEQ ID NO: 3101 - RNA, 22 nt, Artificial Sequence
  Sythetic
gggcaacaaaauagugaacaga

SEQ ID NO: 3102 - RNA, 23 nt, Artificial Sequence
  Sythetic
agggcaacaaaauagugaacaga

SEQ ID NO: 3103 - RNA, 24 nt, Artificial Sequence
  Sythetic
aagggcaacaaaauagugaacaga

SEQ ID NO: 3104 - RNA, 18 nt, Artificial Sequence
  Sythetic
agauagauuauaucugga

SEQ ID NO: 3105 - RNA, 19 nt, Artificial Sequence
  Sythetic
cagauagauuauaucugga

SEQ ID NO: 3106 - RNA, 20 nt, Artificial Sequence
  Sythetic
ucagauagauuauaucugga

SEQ ID NO: 3107 - RNA, 21 nt, Artificial Sequence
  Sythetic
uucagauagauuauaucugga

SEQ ID NO: 3108 - RNA, 22 nt, Artificial Sequence
  Sythetic
cuucagauagauuauaucugga

SEQ ID NO: 3109 - RNA, 23 nt, Artificial Sequence
  Sythetic
gcuucagauagauuauaucugga

SEQ ID NO: 3110 - RNA, 24 nt, Artificial Sequence
  Sythetic
agcuucagauagauuauaucugga

SEQ ID NO: 3111 - RNA, 18 nt, Artificial Sequence
  Sythetic
cuuagacuaggcagcuga

SEQ ID NO: 3112 - RNA, 19 nt, Artificial Sequence
  Sythetic
ccuuagacuaggcagcuga

SEQ ID NO: 3113 - RNA, 20 nt, Artificial Sequence
  Sythetic
accuuagacuaggcagcuga

SEQ ID NO: 3114 - RNA, 21 nt, Artificial Sequence
  Sythetic
caccuuagacuaggcagcuga

SEQ ID NO: 3115 - RNA, 22 nt, Artificial Sequence
  Sythetic
gcaccuuagacuaggcagcuga

SEQ ID NO: 3116 - RNA, 23 nt, Artificial Sequence
  Sythetic
ugcaccuuagacuaggcagcuga

SEQ ID NO: 3117 - RNA, 24 nt, Artificial Sequence
  Sythetic
cugcaccuuagacuaggcagcuga

SEQ ID NO: 3118 - RNA, 18 nt, Artificial Sequence
  Sythetic
uugaagggcaacaaaaua

SEQ ID NO: 3119 - RNA, 19 nt, Artificial Sequence
  Sythetic
uuugaagggcaacaaaaua

SEQ ID NO: 3120 - RNA, 20 nt, Artificial Sequence
  Sythetic
guuugaagggcaacaaaaua

SEQ ID NO: 3121 - RNA, 21 nt, Artificial Sequence
  Sythetic
gguuugaagggcaacaaaaua

SEQ ID NO: 3122 - RNA, 22 nt, Artificial Sequence
  Sythetic
ugguuugaagggcaacaaaaua

SEQ ID NO: 3123 - RNA, 23 nt, Artificial Sequence
  Sythetic
cugguuugaagggcaacaaaaua

SEQ ID NO: 3124 - RNA, 24 nt, Artificial Sequence
  Sythetic
acugguuugaagggcaacaaaaua

SEQ ID NO: 3125 - RNA, 18 nt, Artificial Sequence
  Sythetic
guauauaguauagucaua

SEQ ID NO: 3126 - RNA, 19 nt, Artificial Sequence
  Sythetic
uguauauaguauagucaua

SEQ ID NO: 3127 - RNA, 20 nt, Artificial Sequence
  Sythetic
cuguauauaguauagucaua

SEQ ID NO: 3128 - RNA, 21 nt, Artificial Sequence
  Sythetic
acuguauauaguauagucaua

SEQ ID NO: 3129 - RNA, 22 nt, Artificial Sequence
  Sythetic
gacuguauauaguauagucaua

SEQ ID NO: 3130 - RNA, 23 nt, Artificial Sequence
  Sythetic
ugacuguauauaguauagucaua

SEQ ID NO: 3131 - RNA, 24 nt, Artificial Sequence
  Sythetic
augacuguauauaguauagucaua

SEQ ID NO: 3132 - RNA, 18 nt, Artificial Sequence
  Sythetic
caugaaacugauauauua

SEQ ID NO: 3133 - RNA, 19 nt, Artificial Sequence
  Sythetic
ccaugaaacugauauauua

SEQ ID NO: 3134 - RNA, 20 nt, Artificial Sequence
  Sythetic
gccaugaaacugauauauua

SEQ ID NO: 3135 - RNA, 21 nt, Artificial Sequence
  Sythetic
ugccaugaaacugauauauua

SEQ ID NO: 3136 - RNA, 22 nt, Artificial Sequence
  Sythetic
gugccaugaaacugauauauua

SEQ ID NO: 3137 - RNA, 23 nt, Artificial Sequence
  Sythetic
ugugccaugaaacugauauauua

SEQ ID NO: 3138 - RNA, 24 nt, Artificial Sequence
  Sythetic
cugugccaugaaacugauauauua

SEQ ID NO: 3139 - RNA, 18 nt, Artificial Sequence
  Sythetic
aguauagucauaaagaac

SEQ ID NO: 3140 - RNA, 19 nt, Artificial Sequence
  Sythetic
uaguauagucauaaagaac

SEQ ID NO: 3141 - RNA, 20 nt, Artificial Sequence
  Sythetic
auaguauagucauaaagaac

SEQ ID NO: 3142 - RNA, 21 nt, Artificial Sequence
  Sythetic
uauaguauagucauaaagaac

SEQ ID NO: 3143 - RNA, 22 nt, Artificial Sequence
  Sythetic
auauaguauagucauaaagaac

SEQ ID NO: 3144 - RNA, 23 nt, Artificial Sequence
  Sythetic
uauauaguauagucauaaagaac

SEQ ID NO: 3145 - RNA, 24 nt, Artificial Sequence
  Sythetic
guauauaguauagucauaaagaac

SEQ ID NO: 3146 - RNA, 18 nt, Artificial Sequence
  Sythetic
cagcucugcugacaauac

SEQ ID NO: 3147 - RNA, 19 nt, Artificial Sequence
  Sythetic
ucagcucugcugacaauac

SEQ ID NO: 3148 - RNA, 20 nt, Artificial Sequence
  Sythetic
cucagcucugcugacaauac

SEQ ID NO: 3149 - RNA, 21 nt, Artificial Sequence
  Sythetic
ucucagcucugcugacaauac

SEQ ID NO: 3150 - RNA, 22 nt, Artificial Sequence
  Sythetic
uucucagcucugcugacaauac

SEQ ID NO: 3151 - RNA, 23 nt, Artificial Sequence
  Sythetic
cuucucagcucugcugacaauac

SEQ ID NO: 3152 - RNA, 24 nt, Artificial Sequence
  Sythetic
ucuucucagcucugcugacaauac

SEQ ID NO: 3153 - RNA, 18 nt, Artificial Sequence
  Sythetic
aaccuguuuagcucaccc

SEQ ID NO: 3154 - RNA, 19 nt, Artificial Sequence
  Sythetic
aaaccuguuuagcucaccc

SEQ ID NO: 3155 - RNA, 20 nt, Artificial Sequence
  Sythetic
gaaaccuguuuagcucaccc

SEQ ID NO: 3156 - RNA, 21 nt, Artificial Sequence
  Sythetic
ggaaaccuguuuagcucaccc

SEQ ID NO: 3157 - RNA, 22 nt, Artificial Sequence
  Sythetic
gggaaaccuguuuagcucaccc

SEQ ID NO: 3158 - RNA, 23 nt, Artificial Sequence
  Sythetic
ugggaaaccuguuuagcucaccc

SEQ ID NO: 3159 - RNA, 24 nt, Artificial Sequence
  Sythetic
augggaaaccuguuuagcucaccc

SEQ ID NO: 3160 - RNA, 18 nt, Artificial Sequence
  Sythetic
gaguugucauacauaccc

SEQ ID NO: 3161 - RNA, 19 nt, Artificial Sequence
  Sythetic
agaguugucauacauaccc

SEQ ID NO: 3162 - RNA, 20 nt, Artificial Sequence
  Sythetic
aagaguugucauacauaccc

SEQ ID NO: 3163 - RNA, 21 nt, Artificial Sequence
  Sythetic
uaagaguugucauacauaccc

SEQ ID NO: 3164 - RNA, 22 nt, Artificial Sequence
  Sythetic
uuaagaguugucauacauaccc

SEQ ID NO: 3165 - RNA, 23 nt, Artificial Sequence
  Sythetic
auuaagaguugucauacauaccc

SEQ ID NO: 3166 - RNA, 24 nt, Artificial Sequence
  Sythetic
aauuaagaguugucauacauaccc

SEQ ID NO: 3167 - RNA, 18 nt, Artificial Sequence
  Sythetic
gcagcugagagaagcccc

SEQ ID NO: 3168 - RNA, 19 nt, Artificial Sequence
  Sythetic
ggcagcugagagaagcccc

SEQ ID NO: 3169 - RNA, 20 nt, Artificial Sequence
  Sythetic
aggcagcugagagaagcccc

SEQ ID NO: 3170 - RNA, 21 nt, Artificial Sequence
  Sythetic
uaggcagcugagagaagcccc

SEQ ID NO: 3171 - RNA, 22 nt, Artificial Sequence
  Sythetic
cuaggcagcugagagaagcccc

SEQ ID NO: 3172 - RNA, 23 nt, Artificial Sequence
  Sythetic
acuaggcagcugagagaagcccc

SEQ ID NO: 3173 - RNA, 24 nt, Artificial Sequence
  Sythetic
gacuaggcagcugagagaagcccc

SEQ ID NO: 3174 - RNA, 18 nt, Artificial Sequence
  Sythetic
gccaaggucacggaagcc

SEQ ID NO: 3175 - RNA, 19 nt, Artificial Sequence
  Sythetic
agccaaggucacggaagcc

SEQ ID NO: 3176 - RNA, 20 nt, Artificial Sequence
  Sythetic
gagccaaggucacggaagcc

SEQ ID NO: 3177 - RNA, 21 nt, Artificial Sequence
  Sythetic
agagccaaggucacggaagcc

SEQ ID NO: 3178 - RNA, 22 nt, Artificial Sequence
  Sythetic
uagagccaaggucacggaagcc

SEQ ID NO: 3179 - RNA, 23 nt, Artificial Sequence
  Sythetic
cuagagccaaggucacggaagcc

SEQ ID NO: 3180 - RNA, 24 nt, Artificial Sequence
  Sythetic
ucuagagccaaggucacggaagcc

SEQ ID NO: 3181 - RNA, 18 nt, Artificial Sequence
  Sythetic
cagaugucaccaaccgcc

SEQ ID NO: 3182 - RNA, 19 nt, Artificial Sequence
  Sythetic
ucagaugucaccaaccgcc

SEQ ID NO: 3183 - RNA, 20 nt, Artificial Sequence
  Sythetic
uucagaugucaccaaccgcc

SEQ ID NO: 3184 - RNA, 21 nt, Artificial Sequence
  Sythetic
uuucagaugucaccaaccgcc

SEQ ID NO: 3185 - RNA, 22 nt, Artificial Sequence
  Sythetic
uuuucagaugucaccaaccgcc

SEQ ID NO: 3186 - RNA, 23 nt, Artificial Sequence
  Sythetic
auuuucagaugucaccaaccgcc

SEQ ID NO: 3187 - RNA, 24 nt, Artificial Sequence
  Sythetic
gauuuucagaugucaccaaccgcc

SEQ ID NO: 3188 - RNA, 18 nt, Artificial Sequence
  Sythetic
uuauauacuaacugugcc

SEQ ID NO: 3189 - RNA, 19 nt, Artificial Sequence
  Sythetic
auuauauacuaacugugcc

SEQ ID NO: 3190 - RNA, 20 nt, Artificial Sequence
  Sythetic
aauuauauacuaacugugcc

SEQ ID NO: 3191 - RNA, 21 nt, Artificial Sequence
  Sythetic
gaauuauauacuaacugugcc

SEQ ID NO: 3192 - RNA, 22 nt, Artificial Sequence
  Sythetic
agaauuauauacuaacugugcc

SEQ ID NO: 3193 - RNA, 23 nt, Artificial Sequence
  Sythetic
aagaauuauauacuaacugugcc

SEQ ID NO: 3194 - RNA, 24 nt, Artificial Sequence
  Sythetic
aaagaauuauauacuaacugugcc

SEQ ID NO: 3195 - RNA, 18 nt, Artificial Sequence
  Sythetic
cagagggcaucuuguggc

SEQ ID NO: 3196 - RNA, 19 nt, Artificial Sequence
  Sythetic
ccagagggcaucuuguggc

SEQ ID NO: 3197 - RNA, 20 nt, Artificial Sequence
  Sythetic
cccagagggcaucuuguggc

SEQ ID NO: 3198 - RNA, 21 nt, Artificial Sequence
  Sythetic
gcccagagggcaucuuguggc

SEQ ID NO: 3199 - RNA, 22 nt, Artificial Sequence
  Sythetic
agcccagagggcaucuuguggc

SEQ ID NO: 3200 - RNA, 23 nt, Artificial Sequence
  Sythetic
aagcccagagggcaucuuguggc

SEQ ID NO: 3201 - RNA, 24 nt, Artificial Sequence
  Sythetic
gaagcccagagggcaucuuguggc

SEQ ID NO: 3202 - RNA, 18 nt, Artificial Sequence
  Sythetic
uauucuagagccaagguc

SEQ ID NO: 3203 - RNA, 19 nt, Artificial Sequence
  Sythetic
uuauucuagagccaagguc

SEQ ID NO: 3204 - RNA, 20 nt, Artificial Sequence
  Sythetic
uuuauucuagagccaagguc

SEQ ID NO: 3205 - RNA, 21 nt, Artificial Sequence
  Sythetic
uuuuauucuagagccaagguc

SEQ ID NO: 3206 - RNA, 22 nt, Artificial Sequence
  Sythetic
uuuuuauucuagagccaagguc

SEQ ID NO: 3207 - RNA, 23 nt, Artificial Sequence
  Sythetic
cuuuuuauucuagagccaagguc

SEQ ID NO: 3208 - RNA, 24 nt, Artificial Sequence
  Sythetic
gcuuuuuauucuagagccaagguc

SEQ ID NO: 3209 - RNA, 18 nt, Artificial Sequence
  Sythetic
ccacuaagauccuggguc

SEQ ID NO: 3210 - RNA, 19 nt, Artificial Sequence
  Sythetic
cccacuaagauccuggguc

SEQ ID NO: 3211 - RNA, 20 nt, Artificial Sequence
  Sythetic
ccccacuaagauccuggguc

SEQ ID NO: 3212 - RNA, 21 nt, Artificial Sequence
  Sythetic
uccccacuaagauccuggguc

SEQ ID NO: 3213 - RNA, 22 nt, Artificial Sequence
  Sythetic
auccccacuaagauccuggguc

SEQ ID NO: 3214 - RNA, 23 nt, Artificial Sequence
  Sythetic
aauccccacuaagauccuggguc

SEQ ID NO: 3215 - RNA, 24 nt, Artificial Sequence
  Sythetic
aaauccccacuaagauccuggguc

SEQ ID NO: 3216 - RNA, 18 nt, Artificial Sequence
  Sythetic
uuaggcuucccucuuguc

SEQ ID NO: 3217 - RNA, 19 nt, Artificial Sequence
  Sythetic
uuuaggcuucccucuuguc

SEQ ID NO: 3218 - RNA, 20 nt, Artificial Sequence
  Sythetic
uuuuaggcuucccucuuguc

SEQ ID NO: 3219 - RNA, 21 nt, Artificial Sequence
  Sythetic
uuuuuaggcuucccucuuguc

SEQ ID NO: 3220 - RNA, 22 nt, Artificial Sequence
  Sythetic
auuuuuaggcuucccucuuguc

SEQ ID NO: 3221 - RNA, 23 nt, Artificial Sequence
  Sythetic
cauuuuuaggcuucccucuuguc

SEQ ID NO: 3222 - RNA, 24 nt, Artificial Sequence
  Sythetic
ccauuuuuaggcuucccucuuguc

SEQ ID NO: 3223 - RNA, 18 nt, Artificial Sequence
  Sythetic
agccaaagcuuuuuauuc

SEQ ID NO: 3224 - RNA, 19 nt, Artificial Sequence
  Sythetic
aagccaaagcuuuuuauuc

SEQ ID NO: 3225 - RNA, 20 nt, Artificial Sequence
  Sythetic
caagccaaagcuuuuuauuc

SEQ ID NO: 3226 - RNA, 21 nt, Artificial Sequence
  Sythetic
acaagccaaagcuuuuuauuc

SEQ ID NO: 3227 - RNA, 22 nt, Artificial Sequence
  Sythetic
cacaagccaaagcuuuuuauuc

SEQ ID NO: 3228 - RNA, 23 nt, Artificial Sequence
  Sythetic
ucacaagccaaagcuuuuuauuc

SEQ ID NO: 3229 - RNA, 24 nt, Artificial Sequence
  Sythetic
aucacaagccaaagcuuuuuauuc

SEQ ID NO: 3230 - RNA, 18 nt, Artificial Sequence
  Sythetic
uccuggguccagaaaaag

SEQ ID NO: 3231 - RNA, 19 nt, Artificial Sequence
  Sythetic
auccuggguccagaaaaag

SEQ ID NO: 3232 - RNA, 20 nt, Artificial Sequence
  Sythetic
gauccuggguccagaaaaag

SEQ ID NO: 3233 - RNA, 21 nt, Artificial Sequence
  Sythetic
agauccuggguccagaaaaag

SEQ ID NO: 3234 - RNA, 22 nt, Artificial Sequence
  Sythetic
aagauccuggguccagaaaaag

SEQ ID NO: 3235 - RNA, 23 nt, Artificial Sequence
  Sythetic
uaagauccuggguccagaaaaag

SEQ ID NO: 3236 - RNA, 24 nt, Artificial Sequence
  Sythetic
cuaagauccuggguccagaaaaag

SEQ ID NO: 3237 - RNA, 18 nt, Artificial Sequence
  Sythetic
gcaccuuagacuaggcag

SEQ ID NO: 3238 - RNA, 19 nt, Artificial Sequence
  Sythetic
ugcaccuuagacuaggcag

SEQ ID NO: 3239 - RNA, 20 nt, Artificial Sequence
  Sythetic
cugcaccuuagacuaggcag

SEQ ID NO: 3240 - RNA, 21 nt, Artificial Sequence
  Sythetic
ccugcaccuuagacuaggcag

SEQ ID NO: 3241 - RNA, 22 nt, Artificial Sequence
  Sythetic
cccugcaccuuagacuaggcag

SEQ ID NO: 3242 - RNA, 23 nt, Artificial Sequence
  Sythetic
ucccugcaccuuagacuaggcag

SEQ ID NO: 3243 - RNA, 24 nt, Artificial Sequence
  Sythetic
cucccugcaccuuagacuaggcag

SEQ ID NO: 3244 - RNA, 18 nt, Artificial Sequence
  Sythetic
uaaguucagcugcucuag

SEQ ID NO: 3245 - RNA, 19 nt, Artificial Sequence
  Sythetic
uuaaguucagcugcucuag

SEQ ID NO: 3246 - RNA, 20 nt, Artificial Sequence
  Sythetic
uuuaaguucagcugcucuag

SEQ ID NO: 3247 - RNA, 21 nt, Artificial Sequence
  Sythetic
auuuaaguucagcugcucuag

SEQ ID NO: 3248 - RNA, 22 nt, Artificial Sequence
  Sythetic
uauuuaaguucagcugcucuag

SEQ ID NO: 3249 - RNA, 23 nt, Artificial Sequence
  Sythetic
cuauuuaaguucagcugcucuag

SEQ ID NO: 3250 - RNA, 24 nt, Artificial Sequence
  Sythetic
ucuauuuaaguucagcugcucuag

SEQ ID NO: 3251 - RNA, 18 nt, Artificial Sequence
  Sythetic
augaaacugauauauuag

SEQ ID NO: 3252 - RNA, 19 nt, Artificial Sequence
  Sythetic
caugaaacugauauauuag

SEQ ID NO: 3253 - RNA, 20 nt, Artificial Sequence
  Sythetic
ccaugaaacugauauauuag

SEQ ID NO: 3254 - RNA, 21 nt, Artificial Sequence
  Sythetic
gccaugaaacugauauauuag

SEQ ID NO: 3255 - RNA, 22 nt, Artificial Sequence
  Sythetic
ugccaugaaacugauauauuag

SEQ ID NO: 3256 - RNA, 23 nt, Artificial Sequence
  Sythetic
gugccaugaaacugauauauuag

SEQ ID NO: 3257 - RNA, 24 nt, Artificial Sequence
  Sythetic
ugugccaugaaacugauauauuag

SEQ ID NO: 3258 - RNA, 18 nt, Artificial Sequence
  Sythetic
ggcuucccucuugucugg

SEQ ID NO: 3259 - RNA, 19 nt, Artificial Sequence
  Sythetic
aggcuucccucuugucugg

SEQ ID NO: 3260 - RNA, 20 nt, Artificial Sequence
  Sythetic
uaggcuucccucuugucugg

SEQ ID NO: 3261 - RNA, 21 nt, Artificial Sequence
  Sythetic
uuaggcuucccucuugucugg

SEQ ID NO: 3262 - RNA, 22 nt, Artificial Sequence
  Sythetic
uuuaggcuucccucuugucugg

SEQ ID NO: 3263 - RNA, 23 nt, Artificial Sequence
  Sythetic
uuuuaggcuucccucuugucugg

SEQ ID NO: 3264 - RNA, 24 nt, Artificial Sequence
  Sythetic
uuuuuaggcuucccucuugucugg

SEQ ID NO: 3265 - RNA, 18 nt, Artificial Sequence
  Sythetic
ccauauacuuaugucaug

SEQ ID NO: 3266 - RNA, 19 nt, Artificial Sequence
  Sythetic
accauauacuuaugucaug

SEQ ID NO: 3267 - RNA, 20 nt, Artificial Sequence
  Sythetic
gaccauauacuuaugucaug

SEQ ID NO: 3268 - RNA, 21 nt, Artificial Sequence
  Sythetic
ugaccauauacuuaugucaug

SEQ ID NO: 3269 - RNA, 22 nt, Artificial Sequence
  Sythetic
uugaccauauacuuaugucaug

SEQ ID NO: 3270 - RNA, 23 nt, Artificial Sequence
  Sythetic
cuugaccauauacuuaugucaug

SEQ ID NO: 3271 - RNA, 24 nt, Artificial Sequence
  Sythetic
acuugaccauauacuuaugucaug

SEQ ID NO: 3272 - RNA, 18 nt, Artificial Sequence
  Sythetic
aggcuucccucuugucug

SEQ ID NO: 3273 - RNA, 19 nt, Artificial Sequence
  Sythetic
uaggcuucccucuugucug

SEQ ID NO: 3274 - RNA, 20 nt, Artificial Sequence
  Sythetic
uuaggcuucccucuugucug

SEQ ID NO: 3275 - RNA, 21 nt, Artificial Sequence
  Sythetic
uuuaggcuucccucuugucug

SEQ ID NO: 3276 - RNA, 22 nt, Artificial Sequence
  Sythetic
uuuuaggcuucccucuugucug

SEQ ID NO: 3277 - RNA, 23 nt, Artificial Sequence
  Sythetic
uuuuuaggcuucccucuugucug

SEQ ID NO: 3278 - RNA, 24 nt, Artificial Sequence
  Sythetic
auuuuuaggcuucccucuugucug

SEQ ID NO: 3279 - RNA, 18 nt, Artificial Sequence
  Sythetic
uaaaugcuuacugguuug

SEQ ID NO: 3280 - RNA, 19 nt, Artificial Sequence
  Sythetic
auaaaugcuuacugguuug

SEQ ID NO: 3281 - RNA, 20 nt, Artificial Sequence
  Sythetic
cauaaaugcuuacugguuug

SEQ ID NO: 3282 - RNA, 21 nt, Artificial Sequence
  Sythetic
ucauaaaugcuuacugguuug

SEQ ID NO: 3283 - RNA, 22 nt, Artificial Sequence
  Sythetic
cucauaaaugcuuacugguuug

SEQ ID NO: 3284 - RNA, 23 nt, Artificial Sequence
  Sythetic
ccucauaaaugcuuacugguuug

SEQ ID NO: 3285 - RNA, 24 nt, Artificial Sequence
  Sythetic
uccucauaaaugcuuacugguuug

SEQ ID NO: 3286 - RNA, 18 nt, Artificial Sequence
  Sythetic
accauauacuuaugucau

SEQ ID NO: 3287 - RNA, 19 nt, Artificial Sequence
  Sythetic
gaccauauacuuaugucau

SEQ ID NO: 3288 - RNA, 20 nt, Artificial Sequence
  Sythetic
ugaccauauacuuaugucau

SEQ ID NO: 3289 - RNA, 21 nt, Artificial Sequence
  Sythetic
uugaccauauacuuaugucau

SEQ ID NO: 3290 - RNA, 22 nt, Artificial Sequence
  Sythetic
cuugaccauauacuuaugucau

SEQ ID NO: 3291 - RNA, 23 nt, Artificial Sequence
  Sythetic
acuugaccauauacuuaugucau

SEQ ID NO: 3292 - RNA, 24 nt, Artificial Sequence
  Sythetic
aacuugaccauauacuuaugucau

SEQ ID NO: 3293 - RNA, 18 nt, Artificial Sequence
  Sythetic
cuggguccagaaaaagau

SEQ ID NO: 3294 - RNA, 19 nt, Artificial Sequence
  Sythetic
ccuggguccagaaaaagau

SEQ ID NO: 3295 - RNA, 20 nt, Artificial Sequence
  Sythetic
uccuggguccagaaaaagau

SEQ ID NO: 3296 - RNA, 21 nt, Artificial Sequence
  Sythetic
auccuggguccagaaaaagau

SEQ ID NO: 3297 - RNA, 22 nt, Artificial Sequence
  Sythetic
gauccuggguccagaaaaagau

SEQ ID NO: 3298 - RNA, 23 nt, Artificial Sequence
  Sythetic
agauccuggguccagaaaaagau

SEQ ID NO: 3299 - RNA, 24 nt, Artificial Sequence
  Sythetic
aagauccuggguccagaaaaagau

SEQ ID NO: 3300 - RNA, 18 nt, Artificial Sequence
  Sythetic
gccaugaaacugauauau

SEQ ID NO: 3301 - RNA, 19 nt, Artificial Sequence
  Sythetic
ugccaugaaacugauauau

SEQ ID NO: 3302 - RNA, 20 nt, Artificial Sequence
  Sythetic
gugccaugaaacugauauau

SEQ ID NO: 3303 - RNA, 21 nt, Artificial Sequence
  Sythetic
ugugccaugaaacugauauau

SEQ ID NO: 3304 - RNA, 22 nt, Artificial Sequence
  Sythetic
cugugccaugaaacugauauau

SEQ ID NO: 3305 - RNA, 23 nt, Artificial Sequence
  Sythetic
acugugccaugaaacugauauau

SEQ ID NO: 3306 - RNA, 24 nt, Artificial Sequence
  Sythetic
aacugugccaugaaacugauauau

SEQ ID NO: 3307 - RNA, 18 nt, Artificial Sequence
  Sythetic
gcuucagauagauuauau

SEQ ID NO: 3308 - RNA, 19 nt, Artificial Sequence
  Sythetic
agcuucagauagauuauau

SEQ ID NO: 3309 - RNA, 20 nt, Artificial Sequence
  Sythetic
uagcuucagauagauuauau

SEQ ID NO: 3310 - RNA, 21 nt, Artificial Sequence
  Sythetic
auagcuucagauagauuauau

SEQ ID NO: 3311 - RNA, 22 nt, Artificial Sequence
  Sythetic
cauagcuucagauagauuauau

SEQ ID NO: 3312 - RNA, 23 nt, Artificial Sequence
  Sythetic
ucauagcuucagauagauuauau

SEQ ID NO: 3313 - RNA, 24 nt, Artificial Sequence
  Sythetic
cucauagcuucagauagauuauau

SEQ ID NO: 3314 - RNA, 18 nt, Artificial Sequence
  Sythetic
accuuagacuaggcagcu

SEQ ID NO: 3315 - RNA, 19 nt, Artificial Sequence
  Sythetic
caccuuagacuaggcagcu

SEQ ID NO: 3316 - RNA, 20 nt, Artificial Sequence
  Sythetic
gcaccuuagacuaggcagcu

SEQ ID NO: 3317 - RNA, 21 nt, Artificial Sequence
  Sythetic
ugcaccuuagacuaggcagcu

SEQ ID NO: 3318 - RNA, 22 nt, Artificial Sequence
  Sythetic
cugcaccuuagacuaggcagcu

SEQ ID NO: 3319 - RNA, 23 nt, Artificial Sequence
  Sythetic
ccugcaccuuagacuaggcagcu

SEQ ID NO: 3320 - RNA, 24 nt, Artificial Sequence
  Sythetic
cccugcaccuuagacuaggcagcu

SEQ ID NO: 3321 - RNA, 18 nt, Artificial Sequence
  Sythetic
agagggcaucuuguggcu

SEQ ID NO: 3322 - RNA, 19 nt, Artificial Sequence
  Sythetic
cagagggcaucuuguggcu

SEQ ID NO: 3323 - RNA, 20 nt, Artificial Sequence
  Sythetic
ccagagggcaucuuguggcu

SEQ ID NO: 3324 - RNA, 21 nt, Artificial Sequence
  Sythetic
cccagagggcaucuuguggcu

SEQ ID NO: 3325 - RNA, 22 nt, Artificial Sequence
  Sythetic
gcccagagggcaucuuguggcu

SEQ ID NO: 3326 - RNA, 23 nt, Artificial Sequence
  Sythetic
agcccagagggcaucuuguggcu

SEQ ID NO: 3327 - RNA, 24 nt, Artificial Sequence
  Sythetic
aagcccagagggcaucuuguggcu

SEQ ID NO: 3328 - RNA, 18 nt, Artificial Sequence
  Sythetic
gggucucauuugccuucu

SEQ ID NO: 3329 - RNA, 19 nt, Artificial Sequence
  Sythetic
ggggucucauuugccuucu

SEQ ID NO: 3330 - RNA, 20 nt, Artificial Sequence
  Sythetic
uggggucucauuugccuucu

SEQ ID NO: 3331 - RNA, 21 nt, Artificial Sequence
  Sythetic
uuggggucucauuugccuucu

SEQ ID NO: 3332 - RNA, 22 nt, Artificial Sequence
  Sythetic
uuuggggucucauuugccuucu

SEQ ID NO: 3333 - RNA, 23 nt, Artificial Sequence
  Sythetic
guuuggggucucauuugccuucu

SEQ ID NO: 3334 - RNA, 24 nt, Artificial Sequence
  Sythetic
uguuuggggucucauuugccuucu

SEQ ID NO: 3335 - RNA, 18 nt, Artificial Sequence
  Sythetic
aaaauccucacauuuucu

SEQ ID NO: 3336 - RNA, 19 nt, Artificial Sequence
  Sythetic
uaaaauccucacauuuucu

SEQ ID NO: 3337 - RNA, 20 nt, Artificial Sequence
  Sythetic
guaaaauccucacauuuucu

SEQ ID NO: 3338 - RNA, 21 nt, Artificial Sequence
  Sythetic
uguaaaauccucacauuuucu

SEQ ID NO: 3339 - RNA, 22 nt, Artificial Sequence
  Sythetic
uuguaaaauccucacauuuucu

SEQ ID NO: 3340 - RNA, 23 nt, Artificial Sequence
  Sythetic
auuguaaaauccucacauuuucu

SEQ ID NO: 3341 - RNA, 24 nt, Artificial Sequence
  Sythetic
aauuguaaaauccucacauuuucu

SEQ ID NO: 3342 - RNA, 18 nt, Artificial Sequence
  Sythetic
ucauaaaugcuuacuggu

SEQ ID NO: 3343 - RNA, 19 nt, Artificial Sequence
  Sythetic
cucauaaaugcuuacuggu

SEQ ID NO: 3344 - RNA, 20 nt, Artificial Sequence
  Sythetic
ccucauaaaugcuuacuggu

SEQ ID NO: 3345 - RNA, 21 nt, Artificial Sequence
  Sythetic
uccucauaaaugcuuacuggu

SEQ ID NO: 3346 - RNA, 22 nt, Artificial Sequence
  Sythetic
guccucauaaaugcuuacuggu

SEQ ID NO: 3347 - RNA, 23 nt, Artificial Sequence
  Sythetic
aguccucauaaaugcuuacuggu

SEQ ID NO: 3348 - RNA, 24 nt, Artificial Sequence
  Sythetic
gaguccucauaaaugcuuacuggu

SEQ ID NO: 3349 - RNA, 18 nt, Artificial Sequence
  Sythetic
ggcacguaauuuugcugu

SEQ ID NO: 3350 - RNA, 19 nt, Artificial Sequence
  Sythetic
gggcacguaauuuugcugu

SEQ ID NO: 3351 - RNA, 20 nt, Artificial Sequence
  Sythetic
ggggcacguaauuuugcugu

SEQ ID NO: 3352 - RNA, 21 nt, Artificial Sequence
  Sythetic
gggggcacguaauuuugcugu

SEQ ID NO: 3353 - RNA, 22 nt, Artificial Sequence
  Sythetic
ugggggcacguaauuuugcugu

SEQ ID NO: 3354 - RNA, 23 nt, Artificial Sequence
  Sythetic
uugggggcacguaauuuugcugu

SEQ ID NO: 3355 - RNA, 24 nt, Artificial Sequence
  Sythetic
auugggggcacguaauuuugcugu

SEQ ID NO: 3356 - RNA, 18 nt, Artificial Sequence
  Sythetic
uuuaggcuucccucuugu

SEQ ID NO: 3357 - RNA, 19 nt, Artificial Sequence
  Sythetic
uuuuaggcuucccucuugu

SEQ ID NO: 3358 - RNA, 20 nt, Artificial Sequence
  Sythetic
uuuuuaggcuucccucuugu

SEQ ID NO: 3359 - RNA, 21 nt, Artificial Sequence
  Sythetic
auuuuuaggcuucccucuugu

SEQ ID NO: 3360 - RNA, 22 nt, Artificial Sequence
  Sythetic
cauuuuuaggcuucccucuugu

SEQ ID NO: 3361 - RNA, 23 nt, Artificial Sequence
  Sythetic
ccauuuuuaggcuucccucuugu

SEQ ID NO: 3362 - RNA, 24 nt, Artificial Sequence
  Sythetic
accauuuuuaggcuucccucuugu

SEQ ID NO: 3363 - RNA, 18 nt, Artificial Sequence
  Sythetic
aaaagcucauuuuuaauu

SEQ ID NO: 3364 - RNA, 19 nt, Artificial Sequence
  Sythetic
gaaaagcucauuuuuaauu

SEQ ID NO: 3365 - RNA, 20 nt, Artificial Sequence
  Sythetic
agaaaagcucauuuuuaauu

SEQ ID NO: 3366 - RNA, 21 nt, Artificial Sequence
  Sythetic
uagaaaagcucauuuuuaauu

SEQ ID NO: 3367 - RNA, 22 nt, Artificial Sequence
  Sythetic
cuagaaaagcucauuuuuaauu

SEQ ID NO: 3368 - RNA, 23 nt, Artificial Sequence
  Sythetic
ccuagaaaagcucauuuuuaauu

SEQ ID NO: 3369 - RNA, 24 nt, Artificial Sequence
  Sythetic
cccuagaaaagcucauuuuuaauu

SEQ ID NO: 3370 - RNA, 18 nt, Artificial Sequence
  Sythetic
acuuagacacaacuucuu

SEQ ID NO: 3371 - RNA, 19 nt, Artificial Sequence
  Sythetic
gacuuagacacaacuucuu

SEQ ID NO: 3372 - RNA, 20 nt, Artificial Sequence
  Sythetic
agacuuagacacaacuucuu

SEQ ID NO: 3373 - RNA, 21 nt, Artificial Sequence
  Sythetic
cagacuuagacacaacuucuu

SEQ ID NO: 3374 - RNA, 22 nt, Artificial Sequence
  Sythetic
ccagacuuagacacaacuucuu

SEQ ID NO: 3375 - RNA, 23 nt, Artificial Sequence
  Sythetic
accagacuuagacacaacuucuu

SEQ ID NO: 3376 - RNA, 24 nt, Artificial Sequence
  Sythetic
aaccagacuuagacacaacuucuu

SEQ ID NO: 3377 - RNA, 18 nt, Artificial Sequence
  Sythetic
uaugguucaaaauuaaaa

SEQ ID NO: 3378 - RNA, 19 nt, Artificial Sequence
  Sythetic
uuaugguucaaaauuaaaa

SEQ ID NO: 3379 - RNA, 20 nt, Artificial Sequence
  Sythetic
uuuaugguucaaaauuaaaa

SEQ ID NO: 3380 - RNA, 21 nt, Artificial Sequence
  Sythetic
cuuuaugguucaaaauuaaaa

SEQ ID NO: 3381 - RNA, 22 nt, Artificial Sequence
  Sythetic
ucuuuaugguucaaaauuaaaa

SEQ ID NO: 3382 - RNA, 23 nt, Artificial Sequence
  Sythetic
uucuuuaugguucaaaauuaaaa

SEQ ID NO: 3383 - RNA, 24 nt, Artificial Sequence
  Sythetic
auucuuuaugguucaaaauuaaaa

SEQ ID NO: 3384 - RNA, 18 nt, Artificial Sequence
  Sythetic
ucuuuuuccuccagacaa

SEQ ID NO: 3385 - RNA, 19 nt, Artificial Sequence
  Sythetic
uucuuuuuccuccagacaa

SEQ ID NO: 3386 - RNA, 20 nt, Artificial Sequence
  Sythetic
uuucuuuuuccuccagacaa

SEQ ID NO: 3387 - RNA, 21 nt, Artificial Sequence
  Sythetic
uuuucuuuuuccuccagacaa

SEQ ID NO: 3388 - RNA, 22 nt, Artificial Sequence
  Sythetic
uuuuucuuuuuccuccagacaa

SEQ ID NO: 3389 - RNA, 23 nt, Artificial Sequence
  Sythetic
uuuuuucuuuuuccuccagacaa

SEQ ID NO: 3390 - RNA, 24 nt, Artificial Sequence
  Sythetic
cuuuuuucuuuuuccuccagacaa

SEQ ID NO: 3391 - RNA, 18 nt, Artificial Sequence
  Sythetic
ugaucucuaagaaggcaa

SEQ ID NO: 3392 - RNA, 19 nt, Artificial Sequence
  Sythetic
gugaucucuaagaaggcaa

SEQ ID NO: 3393 - RNA, 20 nt, Artificial Sequence
  Sythetic
ugugaucucuaagaaggcaa

SEQ ID NO: 3394 - RNA, 21 nt, Artificial Sequence
  Sythetic
uugugaucucuaagaaggcaa

SEQ ID NO: 3395 - RNA, 22 nt, Artificial Sequence
  Sythetic
cuugugaucucuaagaaggcaa

SEQ ID NO: 3396 - RNA, 23 nt, Artificial Sequence
  Sythetic
gcuugugaucucuaagaaggcaa

SEQ ID NO: 3397 - RNA, 24 nt, Artificial Sequence
  Sythetic
ggcuugugaucucuaagaaggcaa

SEQ ID NO: 3398 - RNA, 18 nt, Artificial Sequence
  Sythetic
acucacaggguuuaauaa

SEQ ID NO: 3399 - RNA, 19 nt, Artificial Sequence
  Sythetic
gacucacaggguuuaauaa

SEQ ID NO: 3400 - RNA, 20 nt, Artificial Sequence
  Sythetic
agacucacaggguuuaauaa

SEQ ID NO: 3401 - RNA, 21 nt, Artificial Sequence
  Sythetic
gagacucacaggguuuaauaa

SEQ ID NO: 3402 - RNA, 22 nt, Artificial Sequence
  Sythetic
ugagacucacaggguuuaauaa

SEQ ID NO: 3403 - RNA, 23 nt, Artificial Sequence
  Sythetic
uugagacucacaggguuuaauaa

SEQ ID NO: 3404 - RNA, 24 nt, Artificial Sequence
  Sythetic
uuugagacucacaggguuuaauaa

SEQ ID NO: 3405 - RNA, 18 nt, Artificial Sequence
  Sythetic
agagcugagaagacagca

SEQ ID NO: 3406 - RNA, 19 nt, Artificial Sequence
  Sythetic
cagagcugagaagacagca

SEQ ID NO: 3407 - RNA, 20 nt, Artificial Sequence
  Sythetic
gcagagcugagaagacagca

SEQ ID NO: 3408 - RNA, 21 nt, Artificial Sequence
  Sythetic
agcagagcugagaagacagca

SEQ ID NO: 3409 - RNA, 22 nt, Artificial Sequence
  Sythetic
cagcagagcugagaagacagca

SEQ ID NO: 3410 - RNA, 23 nt, Artificial Sequence
  Sythetic
ucagcagagcugagaagacagca

SEQ ID NO: 3411 - RNA, 24 nt, Artificial Sequence
  Sythetic
gucagcagagcugagaagacagca

SEQ ID NO: 3412 - RNA, 18 nt, Artificial Sequence
  Sythetic
cuacaaacacaaacuuca

SEQ ID NO: 3413 - RNA, 19 nt, Artificial Sequence
  Sythetic
acuacaaacacaaacuuca

SEQ ID NO: 3414 - RNA, 20 nt, Artificial Sequence
  Sythetic
aacuacaaacacaaacuuca

SEQ ID NO: 3415 - RNA, 21 nt, Artificial Sequence
  Sythetic
aaacuacaaacacaaacuuca

SEQ ID NO: 3416 - RNA, 22 nt, Artificial Sequence
  Sythetic
gaaacuacaaacacaaacuuca

SEQ ID NO: 3417 - RNA, 23 nt, Artificial Sequence
  Sythetic
agaaacuacaaacacaaacuuca

SEQ ID NO: 3418 - RNA, 24 nt, Artificial Sequence
  Sythetic
cagaaacuacaaacacaaacuuca

SEQ ID NO: 3419 - RNA, 18 nt, Artificial Sequence
  Sythetic
uuuuuccuccagacaaga

SEQ ID NO: 3420 - RNA, 19 nt, Artificial Sequence
  Sythetic
cuuuuuccuccagacaaga

SEQ ID NO: 3421 - RNA, 20 nt, Artificial Sequence
  Sythetic
ucuuuuuccuccagacaaga

SEQ ID NO: 3422 - RNA, 21 nt, Artificial Sequence
  Sythetic
uucuuuuuccuccagacaaga

SEQ ID NO: 3423 - RNA, 22 nt, Artificial Sequence
  Sythetic
uuucuuuuuccuccagacaaga

SEQ ID NO: 3424 - RNA, 23 nt, Artificial Sequence
  Sythetic
uuuucuuuuuccuccagacaaga

SEQ ID NO: 3425 - RNA, 24 nt, Artificial Sequence
  Sythetic
uuuuucuuuuuccuccagacaaga

SEQ ID NO: 3426 - RNA, 18 nt, Artificial Sequence
  Sythetic
uacgugcccccaauccua

SEQ ID NO: 3427 - RNA, 19 nt, Artificial Sequence
  Sythetic
uuacgugcccccaauccua

SEQ ID NO: 3428 - RNA, 20 nt, Artificial Sequence
  Sythetic
auuacgugcccccaauccua

SEQ ID NO: 3429 - RNA, 21 nt, Artificial Sequence
  Sythetic
aauuacgugcccccaauccua

SEQ ID NO: 3430 - RNA, 22 nt, Artificial Sequence
  Sythetic
aaauuacgugcccccaauccua

SEQ ID NO: 3431 - RNA, 23 nt, Artificial Sequence
  Sythetic
aaaauuacgugcccccaauccua

SEQ ID NO: 3432 - RNA, 24 nt, Artificial Sequence
  Sythetic
caaaauuacgugcccccaauccua

SEQ ID NO: 3433 - RNA, 18 nt, Artificial Sequence
  Sythetic
ucuggacccaggaucuua

SEQ ID NO: 3434 - RNA, 19 nt, Artificial Sequence
  Sythetic
uucuggacccaggaucuua

SEQ ID NO: 3435 - RNA, 20 nt, Artificial Sequence
  Sythetic
uuucuggacccaggaucuua

SEQ ID NO: 3436 - RNA, 21 nt, Artificial Sequence
  Sythetic
uuuucuggacccaggaucuua

SEQ ID NO: 3437 - RNA, 22 nt, Artificial Sequence
  Sythetic
uuuuucuggacccaggaucuua

SEQ ID NO: 3438 - RNA, 23 nt, Artificial Sequence
  Sythetic
cuuuuucuggacccaggaucuua

SEQ ID NO: 3439 - RNA, 24 nt, Artificial Sequence
  Sythetic
ucuuuuucuggacccaggaucuua

SEQ ID NO: 3440 - RNA, 18 nt, Artificial Sequence
  Sythetic
uuucuuuuuccuccagac

SEQ ID NO: 3441 - RNA, 19 nt, Artificial Sequence
  Sythetic
uuuucuuuuuccuccagac

SEQ ID NO: 3442 - RNA, 20 nt, Artificial Sequence
  Sythetic
uuuuucuuuuuccuccagac

SEQ ID NO: 3443 - RNA, 21 nt, Artificial Sequence
  Sythetic
uuuuuucuuuuuccuccagac

SEQ ID NO: 3444 - RNA, 22 nt, Artificial Sequence
  Sythetic
cuuuuuucuuuuuccuccagac

SEQ ID NO: 3445 - RNA, 23 nt, Artificial Sequence
  Sythetic
ucuuuuuucuuuuuccuccagac

SEQ ID NO: 3446 - RNA, 24 nt, Artificial Sequence
  Sythetic
cucuuuuuucuuuuuccuccagac

SEQ ID NO: 3447 - RNA, 18 nt, Artificial Sequence
  Sythetic
gucaucuaugaccuuccc

SEQ ID NO: 3448 - RNA, 19 nt, Artificial Sequence
  Sythetic
ugucaucuaugaccuuccc

SEQ ID NO: 3449 - RNA, 20 nt, Artificial Sequence
  Sythetic
uugucaucuaugaccuuccc

SEQ ID NO: 3450 - RNA, 21 nt, Artificial Sequence
  Sythetic
guugucaucuaugaccuuccc

SEQ ID NO: 3451 - RNA, 22 nt, Artificial Sequence
  Sythetic
uguugucaucuaugaccuuccc

SEQ ID NO: 3452 - RNA, 23 nt, Artificial Sequence
  Sythetic
cuguugucaucuaugaccuuccc

SEQ ID NO: 3453 - RNA, 24 nt, Artificial Sequence
  Sythetic
gcuguugucaucuaugaccuuccc

SEQ ID NO: 3454 - RNA, 18 nt, Artificial Sequence
  Sythetic
ugucaucuaugaccuucc

SEQ ID NO: 3455 - RNA, 19 nt, Artificial Sequence
  Sythetic
uugucaucuaugaccuucc

SEQ ID NO: 3456 - RNA, 20 nt, Artificial Sequence
  Sythetic
guugucaucuaugaccuucc

SEQ ID NO: 3457 - RNA, 21 nt, Artificial Sequence
  Sythetic
uguugucaucuaugaccuucc

SEQ ID NO: 3458 - RNA, 22 nt, Artificial Sequence
  Sythetic
cuguugucaucuaugaccuucc

SEQ ID NO: 3459 - RNA, 23 nt, Artificial Sequence
  Sythetic
gcuguugucaucuaugaccuucc

SEQ ID NO: 3460 - RNA, 24 nt, Artificial Sequence
  Sythetic
ggcuguugucaucuaugaccuucc

SEQ ID NO: 3461 - RNA, 18 nt, Artificial Sequence
  Sythetic
uaagagaaaauucucagc

SEQ ID NO: 3462 - RNA, 19 nt, Artificial Sequence
  Sythetic
auaagagaaaauucucagc

SEQ ID NO: 3463 - RNA, 20 nt, Artificial Sequence
  Sythetic
aauaagagaaaauucucagc

SEQ ID NO: 3464 - RNA, 21 nt, Artificial Sequence
  Sythetic
uaauaagagaaaauucucagc

SEQ ID NO: 3465 - RNA, 22 nt, Artificial Sequence
  Sythetic
uuaauaagagaaaauucucagc

SEQ ID NO: 3466 - RNA, 23 nt, Artificial Sequence
  Sythetic
uuuaauaagagaaaauucucagc

SEQ ID NO: 3467 - RNA, 24 nt, Artificial Sequence
  Sythetic
guuuaauaagagaaaauucucagc

SEQ ID NO: 3468 - RNA, 18 nt, Artificial Sequence
  Sythetic
cugccuagucuaaggugc

SEQ ID NO: 3469 - RNA, 19 nt, Artificial Sequence
  Sythetic
gcugccuagucuaaggugc

SEQ ID NO: 3470 - RNA, 20 nt, Artificial Sequence
  Sythetic
agcugccuagucuaaggugc

SEQ ID NO: 3471 - RNA, 21 nt, Artificial Sequence
  Sythetic
cagcugccuagucuaaggugc

SEQ ID NO: 3472 - RNA, 22 nt, Artificial Sequence
  Sythetic
ucagcugccuagucuaaggugc

SEQ ID NO: 3473 - RNA, 23 nt, Artificial Sequence
  Sythetic
cucagcugccuagucuaaggugc

SEQ ID NO: 3474 - RNA, 24 nt, Artificial Sequence
  Sythetic
ucucagcugccuagucuaaggugc

SEQ ID NO: 3475 - RNA, 18 nt, Artificial Sequence
  Sythetic
gacagcagagagcuacuc

SEQ ID NO: 3476 - RNA, 19 nt, Artificial Sequence
  Sythetic
agacagcagagagcuacuc

SEQ ID NO: 3477 - RNA, 20 nt, Artificial Sequence
  Sythetic
aagacagcagagagcuacuc

SEQ ID NO: 3478 - RNA, 21 nt, Artificial Sequence
  Sythetic
gaagacagcagagagcuacuc

SEQ ID NO: 3479 - RNA, 22 nt, Artificial Sequence
  Sythetic
agaagacagcagagagcuacuc

SEQ ID NO: 3480 - RNA, 23 nt, Artificial Sequence
  Sythetic
gagaagacagcagagagcuacuc

SEQ ID NO: 3481 - RNA, 24 nt, Artificial Sequence
  Sythetic
ugagaagacagcagagagcuacuc

SEQ ID NO: 3482 - RNA, 18 nt, Artificial Sequence
  Sythetic
auuaaaaaugagcuuuuc

SEQ ID NO: 3483 - RNA, 19 nt, Artificial Sequence
  Sythetic
aauuaaaaaugagcuuuuc

SEQ ID NO: 3484 - RNA, 20 nt, Artificial Sequence
  Sythetic
aaauuaaaaaugagcuuuuc

SEQ ID NO: 3485 - RNA, 21 nt, Artificial Sequence
  Sythetic
aaaauuaaaaaugagcuuuuc

SEQ ID NO: 3486 - RNA, 22 nt, Artificial Sequence
  Sythetic
caaaauuaaaaaugagcuuuuc

SEQ ID NO: 3487 - RNA, 23 nt, Artificial Sequence
  Sythetic
ucaaaauuaaaaaugagcuuuuc

SEQ ID NO: 3488 - RNA, 24 nt, Artificial Sequence
  Sythetic
uucaaaauuaaaaaugagcuuuuc

SEQ ID NO: 3489 - RNA, 18 nt, Artificial Sequence
  Sythetic
cuuuuuccuccagacaag

SEQ ID NO: 3490 - RNA, 19 nt, Artificial Sequence
  Sythetic
ucuuuuuccuccagacaag

SEQ ID NO: 3491 - RNA, 20 nt, Artificial Sequence
  Sythetic
uucuuuuuccuccagacaag

SEQ ID NO: 3492 - RNA, 21 nt, Artificial Sequence
  Sythetic
uuucuuuuuccuccagacaag

SEQ ID NO: 3493 - RNA, 22 nt, Artificial Sequence
  Sythetic
uuuucuuuuuccuccagacaag

SEQ ID NO: 3494 - RNA, 23 nt, Artificial Sequence
  Sythetic
uuuuucuuuuuccuccagacaag

SEQ ID NO: 3495 - RNA, 24 nt, Artificial Sequence
  Sythetic
uuuuuucuuuuuccuccagacaag

SEQ ID NO: 3496 - RNA, 18 nt, Artificial Sequence
  Sythetic
gcagagcugagaagacag

SEQ ID NO: 3497 - RNA, 19 nt, Artificial Sequence
  Sythetic
agcagagcugagaagacag

SEQ ID NO: 3498 - RNA, 20 nt, Artificial Sequence
  Sythetic
cagcagagcugagaagacag

SEQ ID NO: 3499 - RNA, 21 nt, Artificial Sequence
  Sythetic
ucagcagagcugagaagacag

SEQ ID NO: 3500 - RNA, 22 nt, Artificial Sequence
  Sythetic
gucagcagagcugagaagacag

SEQ ID NO: 3501 - RNA, 23 nt, Artificial Sequence
  Sythetic
ugucagcagagcugagaagacag

SEQ ID NO: 3502 - RNA, 24 nt, Artificial Sequence
  Sythetic
uugucagcagagcugagaagacag

SEQ ID NO: 3503 - RNA, 18 nt, Artificial Sequence
  Sythetic
aauucucagcuagagcag

SEQ ID NO: 3504 - RNA, 19 nt, Artificial Sequence
  Sythetic
aaauucucagcuagagcag

SEQ ID NO: 3505 - RNA, 20 nt, Artificial Sequence
  Sythetic
aaaauucucagcuagagcag

SEQ ID NO: 3506 - RNA, 21 nt, Artificial Sequence
  Sythetic
gaaaauucucagcuagagcag

SEQ ID NO: 3507 - RNA, 22 nt, Artificial Sequence
  Sythetic
agaaaauucucagcuagagcag

SEQ ID NO: 3508 - RNA, 23 nt, Artificial Sequence
  Sythetic
gagaaaauucucagcuagagcag

SEQ ID NO: 3509 - RNA, 24 nt, Artificial Sequence
  Sythetic
agagaaaauucucagcuagagcag

SEQ ID NO: 3510 - RNA, 18 nt, Artificial Sequence
  Sythetic
auucaucugugguggcag

SEQ ID NO: 3511 - RNA, 19 nt, Artificial Sequence
  Sythetic
cauucaucugugguggcag

SEQ ID NO: 3512 - RNA, 20 nt, Artificial Sequence
  Sythetic
acauucaucugugguggcag

SEQ ID NO: 3513 - RNA, 21 nt, Artificial Sequence
  Sythetic
gacauucaucugugguggcag

SEQ ID NO: 3514 - RNA, 22 nt, Artificial Sequence
  Sythetic
ugacauucaucugugguggcag

SEQ ID NO: 3515 - RNA, 23 nt, Artificial Sequence
  Sythetic
augacauucaucugugguggcag

SEQ ID NO: 3516 - RNA, 24 nt, Artificial Sequence
  Sythetic
caugacauucaucugugguggcag

SEQ ID NO: 3517 - RNA, 18 nt, Artificial Sequence
  Sythetic
aaucucaaguauugucag

SEQ ID NO: 3518 - RNA, 19 nt, Artificial Sequence
  Sythetic
aaaucucaaguauugucag

SEQ ID NO: 3519 - RNA, 20 nt, Artificial Sequence
  Sythetic
aaaaucucaaguauugucag

SEQ ID NO: 3520 - RNA, 21 nt, Artificial Sequence
  Sythetic
gaaaaucucaaguauugucag

SEQ ID NO: 3521 - RNA, 22 nt, Artificial Sequence
  Sythetic
ugaaaaucucaaguauugucag

SEQ ID NO: 3522 - RNA, 23 nt, Artificial Sequence
  Sythetic
cugaaaaucucaaguauugucag

SEQ ID NO: 3523 - RNA, 24 nt, Artificial Sequence
  Sythetic
ucugaaaaucucaaguauugucag

SEQ ID NO: 3524 - RNA, 18 nt, Artificial Sequence
  Sythetic
caaguauugucagcagag

SEQ ID NO: 3525 - RNA, 19 nt, Artificial Sequence
  Sythetic
ucaaguauugucagcagag

SEQ ID NO: 3526 - RNA, 20 nt, Artificial Sequence
  Sythetic
cucaaguauugucagcagag

SEQ ID NO: 3527 - RNA, 21 nt, Artificial Sequence
  Sythetic
ucucaaguauugucagcagag

SEQ ID NO: 3528 - RNA, 22 nt, Artificial Sequence
  Sythetic
aucucaaguauugucagcagag

SEQ ID NO: 3529 - RNA, 23 nt, Artificial Sequence
  Sythetic
aaucucaaguauugucagcagag

SEQ ID NO: 3530 - RNA, 24 nt, Artificial Sequence
  Sythetic
aaaucucaaguauugucagcagag

SEQ ID NO: 3531 - RNA, 18 nt, Artificial Sequence
  Sythetic
cuggacccaggaucuuag

SEQ ID NO: 3532 - RNA, 19 nt, Artificial Sequence
  Sythetic
ucuggacccaggaucuuag

SEQ ID NO: 3533 - RNA, 20 nt, Artificial Sequence
  Sythetic
uucuggacccaggaucuuag

SEQ ID NO: 3534 - RNA, 21 nt, Artificial Sequence
  Sythetic
uuucuggacccaggaucuuag

SEQ ID NO: 3535 - RNA, 22 nt, Artificial Sequence
  Sythetic
uuuucuggacccaggaucuuag

SEQ ID NO: 3536 - RNA, 23 nt, Artificial Sequence
  Sythetic
uuuuucuggacccaggaucuuag

SEQ ID NO: 3537 - RNA, 24 nt, Artificial Sequence
  Sythetic
cuuuuucuggacccaggaucuuag

SEQ ID NO: 3538 - RNA, 18 nt, Artificial Sequence
  Sythetic
uuaacuaugggcucacgg

SEQ ID NO: 3539 - RNA, 19 nt, Artificial Sequence
  Sythetic
uuuaacuaugggcucacgg

SEQ ID NO: 3540 - RNA, 20 nt, Artificial Sequence
  Sythetic
uuuuaacuaugggcucacgg

SEQ ID NO: 3541 - RNA, 21 nt, Artificial Sequence
  Sythetic
guuuuaacuaugggcucacgg

SEQ ID NO: 3542 - RNA, 22 nt, Artificial Sequence
  Sythetic
aguuuuaacuaugggcucacgg

SEQ ID NO: 3543 - RNA, 23 nt, Artificial Sequence
  Sythetic
gaguuuuaacuaugggcucacgg

SEQ ID NO: 3544 - RNA, 24 nt, Artificial Sequence
  Sythetic
agaguuuuaacuaugggcucacgg

SEQ ID NO: 3545 - RNA, 18 nt, Artificial Sequence
  Sythetic
gcugccuagucuaaggug

SEQ ID NO: 3546 - RNA, 19 nt, Artificial Sequence
  Sythetic
agcugccuagucuaaggug

SEQ ID NO: 3547 - RNA, 20 nt, Artificial Sequence
  Sythetic
cagcugccuagucuaaggug

SEQ ID NO: 3548 - RNA, 21 nt, Artificial Sequence
  Sythetic
ucagcugccuagucuaaggug

SEQ ID NO: 3549 - RNA, 22 nt, Artificial Sequence
  Sythetic
cucagcugccuagucuaaggug

SEQ ID NO: 3550 - RNA, 23 nt, Artificial Sequence
  Sythetic
ucucagcugccuagucuaaggug

SEQ ID NO: 3551 - RNA, 24 nt, Artificial Sequence
  Sythetic
cucucagcugccuagucuaaggug

SEQ ID NO: 3552 - RNA, 18 nt, Artificial Sequence
  Sythetic
acaaacuucacagaaaau

SEQ ID NO: 3553 - RNA, 19 nt, Artificial Sequence
  Sythetic
cacaaacuucacagaaaau

SEQ ID NO: 3554 - RNA, 20 nt, Artificial Sequence
  Sythetic
acacaaacuucacagaaaau

SEQ ID NO: 3555 - RNA, 21 nt, Artificial Sequence
  Sythetic
aacacaaacuucacagaaaau

SEQ ID NO: 3556 - RNA, 22 nt, Artificial Sequence
  Sythetic
aaacacaaacuucacagaaaau

SEQ ID NO: 3557 - RNA, 23 nt, Artificial Sequence
  Sythetic
caaacacaaacuucacagaaaau

SEQ ID NO: 3558 - RNA, 24 nt, Artificial Sequence
  Sythetic
acaaacacaaacuucacagaaaau

SEQ ID NO: 3559 - RNA, 18 nt, Artificial Sequence
  Sythetic
agacucacaggguuuaau

SEQ ID NO: 3560 - RNA, 19 nt, Artificial Sequence
  Sythetic
gagacucacaggguuuaau

SEQ ID NO: 3561 - RNA, 20 nt, Artificial Sequence
  Sythetic
ugagacucacaggguuuaau

SEQ ID NO: 3562 - RNA, 21 nt, Artificial Sequence
  Sythetic
uugagacucacaggguuuaau

SEQ ID NO: 3563 - RNA, 22 nt, Artificial Sequence
  Sythetic
uuugagacucacaggguuuaau

SEQ ID NO: 3564 - RNA, 23 nt, Artificial Sequence
  Sythetic
guuugagacucacaggguuuaau

SEQ ID NO: 3565 - RNA, 24 nt, Artificial Sequence
  Sythetic
aguuugagacucacaggguuuaau

SEQ ID NO: 3566 - RNA, 18 nt, Artificial Sequence
  Sythetic
cuuggcgguuggugacau

SEQ ID NO: 3567 - RNA, 19 nt, Artificial Sequence
  Sythetic
ucuuggcgguuggugacau

SEQ ID NO: 3568 - RNA, 20 nt, Artificial Sequence
  Sythetic
cucuuggcgguuggugacau

SEQ ID NO: 3569 - RNA, 21 nt, Artificial Sequence
  Sythetic
ucucuuggcgguuggugacau

SEQ ID NO: 3570 - RNA, 22 nt, Artificial Sequence
  Sythetic
cucucuuggcgguuggugacau

SEQ ID NO: 3571 - RNA, 23 nt, Artificial Sequence
  Sythetic
gcucucuuggcgguuggugacau

SEQ ID NO: 3572 - RNA, 24 nt, Artificial Sequence
  Sythetic
agcucucuuggcgguuggugacau

SEQ ID NO: 3573 - RNA, 18 nt, Artificial Sequence
  Sythetic
uaaucuaucugaagcuau

SEQ ID NO: 3574 - RNA, 19 nt, Artificial Sequence
  Sythetic
auaaucuaucugaagcuau

SEQ ID NO: 3575 - RNA, 20 nt, Artificial Sequence
  Sythetic
uauaaucuaucugaagcuau

SEQ ID NO: 3576 - RNA, 21 nt, Artificial Sequence
  Sythetic
auauaaucuaucugaagcuau

SEQ ID NO: 3577 - RNA, 22 nt, Artificial Sequence
  Sythetic
gauauaaucuaucugaagcuau

SEQ ID NO: 3578 - RNA, 23 nt, Artificial Sequence
  Sythetic
agauauaaucuaucugaagcuau

SEQ ID NO: 3579 - RNA, 24 nt, Artificial Sequence
  Sythetic
cagauauaaucuaucugaagcuau

SEQ ID NO: 3580 - RNA, 18 nt, Artificial Sequence
  Sythetic
acuccagauauaaucuau

SEQ ID NO: 3581 - RNA, 19 nt, Artificial Sequence
  Sythetic
cacuccagauauaaucuau

SEQ ID NO: 3582 - RNA, 20 nt, Artificial Sequence
  Sythetic
ucacuccagauauaaucuau

SEQ ID NO: 3583 - RNA, 21 nt, Artificial Sequence
  Sythetic
uucacuccagauauaaucuau

SEQ ID NO: 3584 - RNA, 22 nt, Artificial Sequence
  Sythetic
cuucacuccagauauaaucuau

SEQ ID NO: 3585 - RNA, 23 nt, Artificial Sequence
  Sythetic
ucuucacuccagauauaaucuau

SEQ ID NO: 3586 - RNA, 24 nt, Artificial Sequence
  Sythetic
uucuucacuccagauauaaucuau

SEQ ID NO: 3587 - RNA, 18 nt, Artificial Sequence
  Sythetic
aaaccaguaagcauuuau

SEQ ID NO: 3588 - RNA, 19 nt, Artificial Sequence
  Sythetic
caaaccaguaagcauuuau

SEQ ID NO: 3589 - RNA, 20 nt, Artificial Sequence
  Sythetic
ucaaaccaguaagcauuuau

SEQ ID NO: 3590 - RNA, 21 nt, Artificial Sequence
  Sythetic
uucaaaccaguaagcauuuau

SEQ ID NO: 3591 - RNA, 22 nt, Artificial Sequence
  Sythetic
cuucaaaccaguaagcauuuau

SEQ ID NO: 3592 - RNA, 23 nt, Artificial Sequence
  Sythetic
ccuucaaaccaguaagcauuuau

SEQ ID NO: 3593 - RNA, 24 nt, Artificial Sequence
  Sythetic
cccuucaaaccaguaagcauuuau

SEQ ID NO: 3594 - RNA, 18 nt, Artificial Sequence
  Sythetic
cucuuaauuguggcaacu

SEQ ID NO: 3595 - RNA, 19 nt, Artificial Sequence
  Sythetic
acucuuaauuguggcaacu

SEQ ID NO: 3596 - RNA, 20 nt, Artificial Sequence
  Sythetic
aacucuuaauuguggcaacu

SEQ ID NO: 3597 - RNA, 21 nt, Artificial Sequence
  Sythetic
caacucuuaauuguggcaacu

SEQ ID NO: 3598 - RNA, 22 nt, Artificial Sequence
  Sythetic
acaacucuuaauuguggcaacu

SEQ ID NO: 3599 - RNA, 23 nt, Artificial Sequence
  Sythetic
gacaacucuuaauuguggcaacu

SEQ ID NO: 3600 - RNA, 24 nt, Artificial Sequence
  Sythetic
ugacaacucuuaauuguggcaacu

SEQ ID NO: 3601 - RNA, 18 nt, Artificial Sequence
  Sythetic
gucuaaagaguuuuaacu

SEQ ID NO: 3602 - RNA, 19 nt, Artificial Sequence
  Sythetic
ugucuaaagaguuuuaacu

SEQ ID NO: 3603 - RNA, 20 nt, Artificial Sequence
  Sythetic
uugucuaaagaguuuuaacu

SEQ ID NO: 3604 - RNA, 21 nt, Artificial Sequence
  Sythetic
guugucuaaagaguuuuaacu

SEQ ID NO: 3605 - RNA, 22 nt, Artificial Sequence
  Sythetic
uguugucuaaagaguuuuaacu

SEQ ID NO: 3606 - RNA, 23 nt, Artificial Sequence
  Sythetic
cuguugucuaaagaguuuuaacu

SEQ ID NO: 3607 - RNA, 24 nt, Artificial Sequence
  Sythetic
ccuguugucuaaagaguuuuaacu

SEQ ID NO: 3608 - RNA, 18 nt, Artificial Sequence
  Sythetic
cgagccacaagaugcccu

SEQ ID NO: 3609 - RNA, 19 nt, Artificial Sequence
  Sythetic
ccgagccacaagaugcccu

SEQ ID NO: 3610 - RNA, 20 nt, Artificial Sequence
  Sythetic
cccgagccacaagaugcccu

SEQ ID NO: 3611 - RNA, 21 nt, Artificial Sequence
  Sythetic
ucccgagccacaagaugcccu

SEQ ID NO: 3612 - RNA, 22 nt, Artificial Sequence
  Sythetic
cucccgagccacaagaugcccu

SEQ ID NO: 3613 - RNA, 23 nt, Artificial Sequence
  Sythetic
acucccgagccacaagaugcccu

SEQ ID NO: 3614 - RNA, 24 nt, Artificial Sequence
  Sythetic
uacucccgagccacaagaugcccu

SEQ ID NO: 3615 - RNA, 18 nt, Artificial Sequence
  Sythetic
uauaaucuaucugaagcu

SEQ ID NO: 3616 - RNA, 19 nt, Artificial Sequence
  Sythetic
auauaaucuaucugaagcu

SEQ ID NO: 3617 - RNA, 20 nt, Artificial Sequence
  Sythetic
gauauaaucuaucugaagcu

SEQ ID NO: 3618 - RNA, 21 nt, Artificial Sequence
  Sythetic
agauauaaucuaucugaagcu

SEQ ID NO: 3619 - RNA, 22 nt, Artificial Sequence
  Sythetic
cagauauaaucuaucugaagcu

SEQ ID NO: 3620 - RNA, 23 nt, Artificial Sequence
  Sythetic
ccagauauaaucuaucugaagcu

SEQ ID NO: 3621 - RNA, 24 nt, Artificial Sequence
  Sythetic
uccagauauaaucuaucugaagcu

SEQ ID NO: 3622 - RNA, 18 nt, Artificial Sequence
  Sythetic
aguauugucagcagagcu

SEQ ID NO: 3623 - RNA, 19 nt, Artificial Sequence
  Sythetic
aaguauugucagcagagcu

SEQ ID NO: 3624 - RNA, 20 nt, Artificial Sequence
  Sythetic
caaguauugucagcagagcu

SEQ ID NO: 3625 - RNA, 21 nt, Artificial Sequence
  Sythetic
ucaaguauugucagcagagcu

SEQ ID NO: 3626 - RNA, 22 nt, Artificial Sequence
  Sythetic
cucaaguauugucagcagagcu

SEQ ID NO: 3627 - RNA, 23 nt, Artificial Sequence
  Sythetic
ucucaaguauugucagcagagcu

SEQ ID NO: 3628 - RNA, 24 nt, Artificial Sequence
  Sythetic
aucucaaguauugucagcagagcu

SEQ ID NO: 3629 - RNA, 18 nt, Artificial Sequence
  Sythetic
cuuuggcuugugaucucu

SEQ ID NO: 3630 - RNA, 19 nt, Artificial Sequence
  Sythetic
gcuuuggcuugugaucucu

SEQ ID NO: 3631 - RNA, 20 nt, Artificial Sequence
  Sythetic
agcuuuggcuugugaucucu

SEQ ID NO: 3632 - RNA, 21 nt, Artificial Sequence
  Sythetic
aagcuuuggcuugugaucucu

SEQ ID NO: 3633 - RNA, 22 nt, Artificial Sequence
  Sythetic
aaagcuuuggcuugugaucucu

SEQ ID NO: 3634 - RNA, 23 nt, Artificial Sequence
  Sythetic
aaaagcuuuggcuugugaucucu

SEQ ID NO: 3635 - RNA, 24 nt, Artificial Sequence
  Sythetic
aaaaagcuuuggcuugugaucucu

SEQ ID NO: 3636 - RNA, 18 nt, Artificial Sequence
  Sythetic
uuaaaaaugagcuuuucu

SEQ ID NO: 3637 - RNA, 19 nt, Artificial Sequence
  Sythetic
auuaaaaaugagcuuuucu

SEQ ID NO: 3638 - RNA, 20 nt, Artificial Sequence
  Sythetic
aauuaaaaaugagcuuuucu

SEQ ID NO: 3639 - RNA, 21 nt, Artificial Sequence
  Sythetic
aaauuaaaaaugagcuuuucu

SEQ ID NO: 3640 - RNA, 22 nt, Artificial Sequence
  Sythetic
aaaauuaaaaaugagcuuuucu

SEQ ID NO: 3641 - RNA, 23 nt, Artificial Sequence
  Sythetic
caaaauuaaaaaugagcuuuucu

SEQ ID NO: 3642 - RNA, 24 nt, Artificial Sequence
  Sythetic
ucaaaauuaaaaaugagcuuuucu

SEQ ID NO: 3643 - RNA, 18 nt, Artificial Sequence
  Sythetic
gucuaaggugcagggagu

SEQ ID NO: 3644 - RNA, 19 nt, Artificial Sequence
  Sythetic
agucuaaggugcagggagu

SEQ ID NO: 3645 - RNA, 20 nt, Artificial Sequence
  Sythetic
uagucuaaggugcagggagu

SEQ ID NO: 3646 - RNA, 21 nt, Artificial Sequence
  Sythetic
cuagucuaaggugcagggagu

SEQ ID NO: 3647 - RNA, 22 nt, Artificial Sequence
  Sythetic
ccuagucuaaggugcagggagu

SEQ ID NO: 3648 - RNA, 23 nt, Artificial Sequence
  Sythetic
gccuagucuaaggugcagggagu

SEQ ID NO: 3649 - RNA, 24 nt, Artificial Sequence
  Sythetic
ugccuagucuaaggugcagggagu

SEQ ID NO: 3650 - RNA, 18 nt, Artificial Sequence
  Sythetic
ucaaaccaguaagcauuu

SEQ ID NO: 3651 - RNA, 19 nt, Artificial Sequence
  Sythetic
uucaaaccaguaagcauuu

SEQ ID NO: 3652 - RNA, 20 nt, Artificial Sequence
  Sythetic
cuucaaaccaguaagcauuu

SEQ ID NO: 3653 - RNA, 21 nt, Artificial Sequence
  Sythetic
ccuucaaaccaguaagcauuu

SEQ ID NO: 3654 - RNA, 22 nt, Artificial Sequence
  Sythetic
cccuucaaaccaguaagcauuu

SEQ ID NO: 3655 - RNA, 23 nt, Artificial Sequence
  Sythetic
gcccuucaaaccaguaagcauuu

SEQ ID NO: 3656 - RNA, 24 nt, Artificial Sequence
  Sythetic
ugcccuucaaaccaguaagcauuu

SEQ ID NO: 3657 - RNA, 18 nt, Artificial Sequence
  Sythetic
cagguuucccaucuuuuu

SEQ ID NO: 3658 - RNA, 19 nt, Artificial Sequence
  Sythetic
acagguuucccaucuuuuu

SEQ ID NO: 3659 - RNA, 20 nt, Artificial Sequence
  Sythetic
aacagguuucccaucuuuuu

SEQ ID NO: 3660 - RNA, 21 nt, Artificial Sequence
  Sythetic
aaacagguuucccaucuuuuu

SEQ ID NO: 3661 - RNA, 22 nt, Artificial Sequence
  Sythetic
uaaacagguuucccaucuuuuu

SEQ ID NO: 3662 - RNA, 23 nt, Artificial Sequence
  Sythetic
cuaaacagguuucccaucuuuuu

SEQ ID NO: 3663 - RNA, 24 nt, Artificial Sequence
  Sythetic
gcuaaacagguuucccaucuuuuu

SEQ ID NO: 3664 - RNA, 17 nt, Artificial Sequence
  Sythetic
auccuuaccucucaaaa

SEQ ID NO: 3665 - RNA, 17 nt, Artificial Sequence
  Sythetic
cuaaaagguuaagaaaa

SEQ ID NO: 3666 - RNA, 17 nt, Artificial Sequence
  Sythetic
agcugcuuggccuguua

SEQ ID NO: 3667 - RNA, 17 nt, Artificial Sequence
  Sythetic
auuacuauccaagaagc

SEQ ID NO: 3668 - RNA, 17 nt, Artificial Sequence
  Sythetic
gugaucuuguacaaauc

SEQ ID NO: 3669 - RNA, 17 nt, Artificial Sequence
  Sythetic
ccgguaaguaaccucuc

SEQ ID NO: 3670 - RNA, 17 nt, Artificial Sequence
  Sythetic
auuuacgggcuuuucuc

SEQ ID NO: 3671 - RNA, 17 nt, Artificial Sequence
  Sythetic
agaccagagaucuauuc

SEQ ID NO: 3672 - RNA, 17 nt, Artificial Sequence
  Sythetic
guucuccuuagcagaag

SEQ ID NO: 3673 - RNA, 17 nt, Artificial Sequence
  Sythetic
aucuuucuuuugagagg

SEQ ID NO: 3674 - RNA, 17 nt, Artificial Sequence
  Sythetic
uuuuauacugucuauau

SEQ ID NO: 3675 - RNA, 17 nt, Artificial Sequence
  Sythetic
uucgccuucaauacacu

SEQ ID NO: 3676 - RNA, 17 nt, Artificial Sequence
  Sythetic
ugacccuuuccuuaucu

SEQ ID NO: 3677 - RNA, 17 nt, Artificial Sequence
  Sythetic
cuacuuuuauacugucu

SEQ ID NO: 3678 - RNA, 17 nt, Artificial Sequence
  Sythetic
uaaaaagaagaacuguu

SEQ ID NO: 3679 - RNA, 17 nt, Artificial Sequence
  Sythetic
ggucugaagguuuauuu

SEQ ID NO: 3680 - RNA, 20 nt, Artificial Sequence
  Sythetic
acaauccuuaccucucaaaa

SEQ ID NO: 3681 - RNA, 20 nt, Artificial Sequence
  Sythetic
aggcuaaaagguuaagaaaa

SEQ ID NO: 3682 - RNA, 20 nt, Artificial Sequence
  Sythetic
uacauuuaaaguugguuuaa

SEQ ID NO: 3683 - RNA, 20 nt, Artificial Sequence
  Sythetic
cucagcugcuuggccuguua

SEQ ID NO: 3684 - RNA, 20 nt, Artificial Sequence
  Sythetic
gaaauuacuauccaagaagc

SEQ ID NO: 3685 - RNA, 20 nt, Artificial Sequence
  Sythetic
ccugugaucuuguacaaauc

SEQ ID NO: 3686 - RNA, 20 nt, Artificial Sequence
  Sythetic
uccccgguaaguaaccucuc

SEQ ID NO: 3687 - RNA, 20 nt, Artificial Sequence
  Sythetic
uuuauuuacgggcuuuucuc

SEQ ID NO: 3688 - RNA, 20 nt, Artificial Sequence
  Sythetic
uucagaccagagaucuauuc

SEQ ID NO: 3689 - RNA, 20 nt, Artificial Sequence
  Sythetic
uuaguucuccuuagcagaag

SEQ ID NO: 3690 - RNA, 20 nt, Artificial Sequence
  Sythetic
gaacaguucuucuuuuuaag

SEQ ID NO: 3691 - RNA, 20 nt, Artificial Sequence
  Sythetic
caaaucuuucuuuugagagg

SEQ ID NO: 3692 - RNA, 20 nt, Artificial Sequence
  Sythetic
uacuuuuauacugucuauau

SEQ ID NO: 3693 - RNA, 20 nt, Artificial Sequence
  Sythetic
cuuuucgccuucaauacacu

SEQ ID NO: 3694 - RNA, 20 nt, Artificial Sequence
  Sythetic
cugugacccuuuccuuaucu

SEQ ID NO: 3695 - RNA, 20 nt, Artificial Sequence
  Sythetic
uuccuacuuuuauacugucu

SEQ ID NO: 3696 - RNA, 20 nt, Artificial Sequence
  Sythetic
ccuuagcagaagauaagauu

SEQ ID NO: 3697 - RNA, 20 nt, Artificial Sequence
  Sythetic
acuuaaaaagaagaacuguu

SEQ ID NO: 3698 - RNA, 20 nt, Artificial Sequence
  Sythetic
ucuggucugaagguuuauuu

SEQ ID NO: 3699 - RNA, 17 nt, Artificial Sequence
  Sythetic
aacaucaaagauacaaa

SEQ ID NO: 3700 - RNA, 17 nt, Artificial Sequence
  Sythetic
auuuaaaguugguuuaa

SEQ ID NO: 3701 - RNA, 17 nt, Artificial Sequence
  Sythetic
ugauuuguacaagauca

SEQ ID NO: 3702 - RNA, 17 nt, Artificial Sequence
  Sythetic
caguucuucuuuuuaag

SEQ ID NO: 3703 - RNA, 17 nt, Artificial Sequence
  Sythetic
auuucuuuuacuaaaau

SEQ ID NO: 3704 - RNA, 17 nt, Artificial Sequence
  Sythetic
uauucuuuauauuuucu

SEQ ID NO: 3705 - RNA, 17 nt, Artificial Sequence
  Sythetic
uagcagaagauaagauu

SEQ ID NO: 3706 - RNA, 20 nt, Artificial Sequence
  Sythetic
uauaacaucaaagauacaaa

SEQ ID NO: 3707 - RNA, 20 nt, Artificial Sequence
  Sythetic
aaaugauuuguacaagauca

SEQ ID NO: 3708 - RNA, 20 nt, Artificial Sequence
  Sythetic
guaauuucuuuuacuaaaau

SEQ ID NO: 3709 - RNA, 20 nt, Artificial Sequence
  Sythetic
cuuuauucuuuauauuuucu

SEQ ID NO: 3710 - RNA, 17 nt, Artificial Sequence
  Sythetic
augguucaaaauuaaaa

SEQ ID NO: 3711 - RNA, 17 nt, Artificial Sequence
  Sythetic
augucaccaaccgccaa

SEQ ID NO: 3712 - RNA, 17 nt, Artificial Sequence
  Sythetic
aauuucucauagcuuca

SEQ ID NO: 3713 - RNA, 17 nt, Artificial Sequence
  Sythetic
accuuggcucuagaaua

SEQ ID NO: 3714 - RNA, 17 nt, Artificial Sequence
  Sythetic
agcucugcugacaauac

SEQ ID NO: 3715 - RNA, 17 nt, Artificial Sequence
  Sythetic
gcucuagaauaaaaagc

SEQ ID NO: 3716 - RNA, 17 nt, Artificial Sequence
  Sythetic
ucuuagagaucacaagc

SEQ ID NO: 3717 - RNA, 17 nt, Artificial Sequence
  Sythetic
uggacccaggaucuuag

SEQ ID NO: 3718 - RNA, 17 nt, Artificial Sequence
  Sythetic
aaacuucacagaaaaug

SEQ ID NO: 3719 - RNA, 17 nt, Artificial Sequence
  Sythetic
ugccagauacauaggug

SEQ ID NO: 3720 - RNA, 17 nt, Artificial Sequence
  Sythetic
auagugugaguccucau

SEQ ID NO: 3721 - RNA, 17 nt, Artificial Sequence
  Sythetic
gagccacaagaugcccu

SEQ ID NO: 3722 - RNA, 17 nt, Artificial Sequence
  Sythetic
ucauguggaaaauuucu

SEQ ID NO: 3723 - RNA, 17 nt, Artificial Sequence
  Sythetic
uaaaaaugagcuuuucu

SEQ ID NO: 3724 - RNA, 17 nt, Artificial Sequence
  Sythetic
auuaauuuugaccauuu

SEQ ID NO: 3725 - RNA, 20 nt, Artificial Sequence
  Sythetic
uuuaugguucaaaauuaaaa

SEQ ID NO: 3726 - RNA, 20 nt, Artificial Sequence
  Sythetic
cagaugucaccaaccgccaa

SEQ ID NO: 3727 - RNA, 20 nt, Artificial Sequence
  Sythetic
gaaaauuucucauagcuuca

SEQ ID NO: 3728 - RNA, 20 nt, Artificial Sequence
  Sythetic
gugaccuuggcucuagaaua

SEQ ID NO: 3729 - RNA, 20 nt, Artificial Sequence
  Sythetic
cucagcucugcugacaauac

SEQ ID NO: 3730 - RNA, 20 nt, Artificial Sequence
  Sythetic
uuggcucuagaauaaaaagc

SEQ ID NO: 3731 - RNA, 20 nt, Artificial Sequence
  Sythetic
ccuucuuagagaucacaagc

SEQ ID NO: 3732 - RNA, 20 nt, Artificial Sequence
  Sythetic
uucuggacccaggaucuuag

SEQ ID NO: 3733 - RNA, 20 nt, Artificial Sequence
  Sythetic
cacaaacuucacagaaaaug

SEQ ID NO: 3734 - RNA, 20 nt, Artificial Sequence
  Sythetic
cuaugccagauacauaggug

SEQ ID NO: 3735 - RNA, 20 nt, Artificial Sequence
  Sythetic
ggcauagugugaguccucau

SEQ ID NO: 3736 - RNA, 20 nt, Artificial Sequence
  Sythetic
cccgagccacaagaugcccu

SEQ ID NO: 3737 - RNA, 20 nt, Artificial Sequence
  Sythetic
augucauguggaaaauuucu

SEQ ID NO: 3738 - RNA, 20 nt, Artificial Sequence
  Sythetic
aauuaaaaaugagcuuuucu

SEQ ID NO: 3739 - RNA, 20 nt, Artificial Sequence
  Sythetic
aauauuaauuuugaccauuu

SEQ ID NO: 3740 - RNA, 17 nt, Artificial Sequence
  Sythetic
guugguggcguggacga

SEQ ID NO: 3741 - RNA, 17 nt, Artificial Sequence
  Sythetic
uugaugccguggcaaac

SEQ ID NO: 3742 - RNA, 17 nt, Artificial Sequence
  Sythetic
ggaggucggccacugac

SEQ ID NO: 3743 - RNA, 17 nt, Artificial Sequence
  Sythetic
caauggauuggucaucc

SEQ ID NO: 3744 - RNA, 17 nt, Artificial Sequence
  Sythetic
uggucuauguuggcguc

SEQ ID NO: 3745 - RNA, 17 nt, Artificial Sequence
  Sythetic
cgcaucuggagaaccag

SEQ ID NO: 3746 - RNA, 17 nt, Artificial Sequence
  Sythetic
ugguucuccagaugcgg

SEQ ID NO: 3747 - RNA, 20 nt, Artificial Sequence
  Sythetic
acggcaucaacugcccagaa

SEQ ID NO: 3748 - RNA, 20 nt, Artificial Sequence
  Sythetic
cccaaaguaccaguuugcca

SEQ ID NO: 3749 - RNA, 20 nt, Artificial Sequence
  Sythetic
uggauuggucauccugguca

SEQ ID NO: 3750 - RNA, 20 nt, Artificial Sequence
  Sythetic
gaaccagcgguuaccaugga

SEQ ID NO: 3751 - RNA, 20 nt, Artificial Sequence
  Sythetic
guagcgguccagacugauga

SEQ ID NO: 3752 - RNA, 20 nt, Artificial Sequence
  Sythetic
caguugaugccguggcaaac

SEQ ID NO: 3753 - RNA, 20 nt, Artificial Sequence
  Sythetic
agaggaggucggccacugac

SEQ ID NO: 3754 - RNA, 20 nt, Artificial Sequence
  Sythetic
gaagcaugacggacaaguac

SEQ ID NO: 3755 - RNA, 20 nt, Artificial Sequence
  Sythetic
ucuucugguaacccaugacc

SEQ ID NO: 3756 - RNA, 20 nt, Artificial Sequence
  Sythetic
auccccuccaugguaaccgc

SEQ ID NO: 3757 - RNA, 20 nt, Artificial Sequence
  Sythetic
agguggucuauguuggcguc

SEQ ID NO: 3758 - RNA, 20 nt, Artificial Sequence
  Sythetic
uugucaucacgcuucccuuc

SEQ ID NO: 3759 - RNA, 20 nt, Artificial Sequence
  Sythetic
caccgcaucuggagaaccag

SEQ ID NO: 3760 - RNA, 20 nt, Artificial Sequence
  Sythetic
uccacgccaccaacagucag

SEQ ID NO: 3761 - RNA, 20 nt, Artificial Sequence
  Sythetic
cacuucagauaacuacaccg

SEQ ID NO: 3762 - RNA, 20 nt, Artificial Sequence
  Sythetic
cuucugggcaguugaugccg

SEQ ID NO: 3763 - RNA, 20 nt, Artificial Sequence
  Sythetic
gccucugacuguugguggcg

SEQ ID NO: 3764 - RNA, 20 nt, Artificial Sequence
  Sythetic
gaagcgugaugacaaagagg

SEQ ID NO: 3765 - RNA, 20 nt, Artificial Sequence
  Sythetic
cgcugguucuccagaugcgg

SEQ ID NO: 3766 - RNA, 20 nt, Artificial Sequence
  Sythetic
agaaccagcgguuaccaugg

SEQ ID NO: 3767 - RNA, 20 nt, Artificial Sequence
  Sythetic
aaccgcugguucuccagaug

SEQ ID NO: 3768 - RNA, 20 nt, Artificial Sequence
  Sythetic
ggauuggucauccuggucau

SEQ ID NO: 3769 - RNA, 20 nt, Artificial Sequence
  Sythetic
ugucaucacgcuucccuucu

SEQ ID NO: 3770 - RNA, 20 nt, Artificial Sequence
  Sythetic
gcugaaaagguggucuaugu

SEQ ID NO: 3771 - RNA, 20 nt, Artificial Sequence
  Sythetic
gccguggcaaacugguacuu

SEQ ID NO: 3772 - RNA, 20 nt, Artificial Sequence
  Sythetic
ccguggcaaacugguacuuu

SEQ ID NO: 3773 - RNA, 17 nt, Artificial Sequence
  Sythetic
uaacuacaccgaggaaa

SEQ ID NO: 3774 - RNA, 17 nt, Artificial Sequence
  Sythetic
gaagcuguuggcugaaa

SEQ ID NO: 3775 - RNA, 17 nt, Artificial Sequence
  Sythetic
aucugcaaaagaggcaa

SEQ ID NO: 3776 - RNA, 17 nt, Artificial Sequence
  Sythetic
acuggcauugugggcaa

SEQ ID NO: 3777 - RNA, 17 nt, Artificial Sequence
  Sythetic
gcaucaacugcccagaa

SEQ ID NO: 3778 - RNA, 17 nt, Artificial Sequence
  Sythetic
caaaagaggcaaaggaa

SEQ ID NO: 3779 - RNA, 17 nt, Artificial Sequence
  Sythetic
uuuucuucacggaaaca

SEQ ID NO: 3780 - RNA, 17 nt, Artificial Sequence
  Sythetic
ugacuguguagaugaca

SEQ ID NO: 3781 - RNA, 17 nt, Artificial Sequence
  Sythetic
agaaccagcgguuacca

SEQ ID NO: 3782 - RNA, 17 nt, Artificial Sequence
  Sythetic
ccaacagucagaggcca

SEQ ID NO: 3783 - RNA, 17 nt, Artificial Sequence
  Sythetic
aaaguaccaguuugcca

SEQ ID NO: 3784 - RNA, 17 nt, Artificial Sequence
  Sythetic
uacacugauccccucca

SEQ ID NO: 3785 - RNA, 17 nt, Artificial Sequence
  Sythetic
uagucagcaggagggca

SEQ ID NO: 3786 - RNA, 17 nt, Artificial Sequence
  Sythetic
ugggaacuuccuaugca

SEQ ID NO: 3787 - RNA, 17 nt, Artificial Sequence
  Sythetic
ccgaggaaaugggcuca

SEQ ID NO: 3788 - RNA, 17 nt, Artificial Sequence
  Sythetic
auuggucauccugguca

SEQ ID NO: 3789 - RNA, 17 nt, Artificial Sequence
  Sythetic
gaaacaggguuccuuca

SEQ ID NO: 3790 - RNA, 17 nt, Artificial Sequence
  Sythetic
aauuagcauuuucuuca

SEQ ID NO: 3791 - RNA, 17 nt, Artificial Sequence
  Sythetic
ggcaucaacugcccaga

SEQ ID NO: 3792 - RNA, 17 nt, Artificial Sequence
  Sythetic
gaagaugauggaguaga

SEQ ID NO: 3793 - RNA, 17 nt, Artificial Sequence
  Sythetic
gggaauagucagcagga

SEQ ID NO: 3794 - RNA, 17 nt, Artificial Sequence
  Sythetic
ccagcgguuaccaugga

SEQ ID NO: 3795 - RNA, 17 nt, Artificial Sequence
  Sythetic
ggacuaugacuccauga

SEQ ID NO: 3796 - RNA, 17 nt, Artificial Sequence
  Sythetic
gaaacugagaagcauga

SEQ ID NO: 3797 - RNA, 17 nt, Artificial Sequence
  Sythetic
gccaguuaagaagauga

SEQ ID NO: 3798 - RNA, 17 nt, Artificial Sequence
  Sythetic
gcgguccagacugauga

SEQ ID NO: 3799 - RNA, 17 nt, Artificial Sequence
  Sythetic
auuuucuucacggaaac

SEQ ID NO: 3800 - RNA, 17 nt, Artificial Sequence
  Sythetic
acaaagcagguugaaac

SEQ ID NO: 3801 - RNA, 17 nt, Artificial Sequence
  Sythetic
uccaucaucuucuuaac

SEQ ID NO: 3802 - RNA, 17 nt, Artificial Sequence
  Sythetic
gcaugacggacaaguac

SEQ ID NO: 3803 - RNA, 17 nt, Artificial Sequence
  Sythetic
ucugguaacccaugacc

SEQ ID NO: 3804 - RNA, 17 nt, Artificial Sequence
  Sythetic
cagucuggaccgcuacc

SEQ ID NO: 3805 - RNA, 17 nt, Artificial Sequence
  Sythetic
ccagacugaugaaggcc

SEQ ID NO: 3806 - RNA, 17 nt, Artificial Sequence
  Sythetic
uggcguggacgauggcc

SEQ ID NO: 3807 - RNA, 17 nt, Artificial Sequence
  Sythetic
cagcaguguccucaucc

SEQ ID NO: 3808 - RNA, 17 nt, Artificial Sequence
  Sythetic
agucgggaauagucagc

SEQ ID NO: 3809 - RNA, 17 nt, Artificial Sequence
  Sythetic
cccuccaugguaaccgc

SEQ ID NO: 3810 - RNA, 17 nt, Artificial Sequence
  Sythetic
auagucagcaggagggc

SEQ ID NO: 3811 - RNA, 17 nt, Artificial Sequence
  Sythetic
uggaguagauggugggc

SEQ ID NO: 3812 - RNA, 17 nt, Artificial Sequence
  Sythetic
accgaggaaaugggcuc

SEQ ID NO: 3813 - RNA, 17 nt, Artificial Sequence
  Sythetic
ccuggccuucaucaguc

SEQ ID NO: 3814 - RNA, 17 nt, Artificial Sequence
  Sythetic
ucaucacgcuucccuuc

SEQ ID NO: 3815 - RNA, 17 nt, Artificial Sequence
  Sythetic
ugcuucucaguuucuuc

SEQ ID NO: 3816 - RNA, 17 nt, Artificial Sequence
  Sythetic
guguauaucugcaaaag

SEQ ID NO: 3817 - RNA, 17 nt, Artificial Sequence
  Sythetic
gaagcgugaugacaaag

SEQ ID NO: 3818 - RNA, 17 nt, Artificial Sequence
  Sythetic
cgaggaaaugggcucag

SEQ ID NO: 3819 - RNA, 17 nt, Artificial Sequence
  Sythetic
acgccaccaacagucag

SEQ ID NO: 3820 - RNA, 17 nt, Artificial Sequence
  Sythetic
caggcugcaccugucag

SEQ ID NO: 3821 - RNA, 17 nt, Artificial Sequence
  Sythetic
cagcgguuaccauggag

SEQ ID NO: 3822 - RNA, 17 nt, Artificial Sequence
  Sythetic
ggacgauggccagguag

SEQ ID NO: 3823 - RNA, 17 nt, Artificial Sequence
  Sythetic
ugaggacacugcuguag

SEQ ID NO: 3824 - RNA, 17 nt, Artificial Sequence
  Sythetic
uucagauaacuacaccg

SEQ ID NO: 3825 - RNA, 17 nt, Artificial Sequence
  Sythetic
cugggcaguugaugccg

SEQ ID NO: 3826 - RNA, 17 nt, Artificial Sequence
  Sythetic
ucugacuguugguggcg

SEQ ID NO: 3827 - RNA, 17 nt, Artificial Sequence
  Sythetic
gcuguuggcugaaaagg

SEQ ID NO: 3828 - RNA, 17 nt, Artificial Sequence
  Sythetic
cgggaauagucagcagg

SEQ ID NO: 3829 - RNA, 17 nt, Artificial Sequence
  Sythetic
gcgugaugacaaagagg

SEQ ID NO: 3830 - RNA, 17 nt, Artificial Sequence
  Sythetic
accagcgguuaccaugg

SEQ ID NO: 3831 - RNA, 17 nt, Artificial Sequence
  Sythetic
gaugauggaguagaugg

SEQ ID NO: 3832 - RNA, 17 nt, Artificial Sequence
  Sythetic
uggccucugacuguugg

SEQ ID NO: 3833 - RNA, 17 nt, Artificial Sequence
  Sythetic
cgcugguucuccagaug

SEQ ID NO: 3834 - RNA, 17 nt, Artificial Sequence
  Sythetic
ugaugaaggccaggaug

SEQ ID NO: 3835 - RNA, 17 nt, Artificial Sequence
  Sythetic
cuucuuaacuggcauug

SEQ ID NO: 3836 - RNA, 17 nt, Artificial Sequence
  Sythetic
aacuacaccgaggaaau

SEQ ID NO: 3837 - RNA, 17 nt, Artificial Sequence
  Sythetic
guuaaugcuugcugaau

SEQ ID NO: 3838 - RNA, 17 nt, Artificial Sequence
  Sythetic
cauggacugccuugcau

SEQ ID NO: 3839 - RNA, 17 nt, Artificial Sequence
  Sythetic
uuggucauccuggucau

SEQ ID NO: 3840 - RNA, 17 nt, Artificial Sequence
  Sythetic
cauugugggcaauggau

SEQ ID NO: 3841 - RNA, 17 nt, Artificial Sequence
  Sythetic
ucagccaacagcuuccu

SEQ ID NO: 3842 - RNA, 17 nt, Artificial Sequence
  Sythetic
cccugagcccauuuccu

SEQ ID NO: 3843 - RNA, 17 nt, Artificial Sequence
  Sythetic
caucacgcuucccuucu

SEQ ID NO: 3844 - RNA, 17 nt, Artificial Sequence
  Sythetic
gaugacaaagaggaggu

SEQ ID NO: 3845 - RNA, 17 nt, Artificial Sequence
  Sythetic
augauggaguagauggu

SEQ ID NO: 3846 - RNA, 17 nt, Artificial Sequence
  Sythetic
gaaaagguggucuaugu

SEQ ID NO: 3847 - RNA, 17 nt, Artificial Sequence
  Sythetic
ccuuggccucugacugu

SEQ ID NO: 3848 - RNA, 17 nt, Artificial Sequence
  Sythetic
gaggccaaggaagcugu

SEQ ID NO: 3849 - RNA, 17 nt, Artificial Sequence
  Sythetic
uucuuaacuggcauugu

SEQ ID NO: 3850 - RNA, 17 nt, Artificial Sequence
  Sythetic
guggcaaacugguacuu

SEQ ID NO: 3851 - RNA, 17 nt, Artificial Sequence
  Sythetic
uggcaaacugguacuuu

SEQ ID NO: 3852 - RNA, 20 nt, Artificial Sequence
  Sythetic
agauaacuacaccgaggaaa

SEQ ID NO: 3853 - RNA, 20 nt, Artificial Sequence
  Sythetic
aaggaagcuguuggcugaaa

SEQ ID NO: 3854 - RNA, 20 nt, Artificial Sequence
  Sythetic
uauaucugcaaaagaggcaa

SEQ ID NO: 3855 - RNA, 20 nt, Artificial Sequence
  Sythetic
uuaacuggcauugugggcaa

SEQ ID NO: 3856 - RNA, 20 nt, Artificial Sequence
  Sythetic
cugcaaaagaggcaaaggaa

SEQ ID NO: 3857 - RNA, 20 nt, Artificial Sequence
  Sythetic
gcauuuucuucacggaaaca

SEQ ID NO: 3858 - RNA, 20 nt, Artificial Sequence
  Sythetic
gguugacuguguagaugaca

SEQ ID NO: 3859 - RNA, 20 nt, Artificial Sequence
  Sythetic
uggagaaccagcgguuacca

SEQ ID NO: 3860 - RNA, 20 nt, Artificial Sequence
  Sythetic
ccaccaacagucagaggcca

SEQ ID NO: 3861 - RNA, 20 nt, Artificial Sequence
  Sythetic
acuuacacugauccccucca

SEQ ID NO: 3862 - RNA, 20 nt, Artificial Sequence
  Sythetic
gaauagucagcaggagggca

SEQ ID NO: 3863 - RNA, 20 nt, Artificial Sequence
  Sythetic
cuuugggaacuuccuaugca

SEQ ID NO: 3864 - RNA, 20 nt, Artificial Sequence
  Sythetic
acaccgaggaaaugggcuca

SEQ ID NO: 3865 - RNA, 20 nt, Artificial Sequence
  Sythetic
acggaaacaggguuccuuca

SEQ ID NO: 3866 - RNA, 20 nt, Artificial Sequence
  Sythetic
ugaaauuagcauuuucuuca

SEQ ID NO: 3867 - RNA, 20 nt, Artificial Sequence
  Sythetic
cacggcaucaacugcccaga

SEQ ID NO: 3868 - RNA, 20 nt, Artificial Sequence
  Sythetic
uaagaagaugauggaguaga

SEQ ID NO: 3869 - RNA, 20 nt, Artificial Sequence
  Sythetic
acuguugguggcguggacga

SEQ ID NO: 3870 - RNA, 20 nt, Artificial Sequence
  Sythetic
gucgggaauagucagcagga

SEQ ID NO: 3871 - RNA, 20 nt, Artificial Sequence
  Sythetic
aggggacuaugacuccauga

SEQ ID NO: 3872 - RNA, 20 nt, Artificial Sequence
  Sythetic
gaagaaacugagaagcauga

SEQ ID NO: 3873 - RNA, 20 nt, Artificial Sequence
  Sythetic
aaugccaguuaagaagauga

SEQ ID NO: 3874 - RNA, 20 nt, Artificial Sequence
  Sythetic
agcauuuucuucacggaaac

SEQ ID NO: 3875 - RNA, 20 nt, Artificial Sequence
  Sythetic
augacaaagcagguugaaac

SEQ ID NO: 3876 - RNA, 20 nt, Artificial Sequence
  Sythetic
uacuccaucaucuucuuaac

SEQ ID NO: 3877 - RNA, 20 nt, Artificial Sequence
  Sythetic
caucagucuggaccgcuacc

SEQ ID NO: 3878 - RNA, 20 nt, Artificial Sequence
  Sythetic
gguccagacugaugaaggcc

SEQ ID NO: 3879 - RNA, 20 nt, Artificial Sequence
  Sythetic
ugguggcguggacgauggcc

SEQ ID NO: 3880 - RNA, 20 nt, Artificial Sequence
  Sythetic
cuacagcaguguccucaucc

SEQ ID NO: 3881 - RNA, 20 nt, Artificial Sequence
  Sythetic
gggcaauggauuggucaucc

SEQ ID NO: 3882 - RNA, 20 nt, Artificial Sequence
  Sythetic
ugaagucgggaauagucagc

SEQ ID NO: 3883 - RNA, 20 nt, Artificial Sequence
  Sythetic
ggaauagucagcaggagggc

SEQ ID NO: 3884 - RNA, 20 nt, Artificial Sequence
  Sythetic
ugauggaguagauggugggc

SEQ ID NO: 3885 - RNA, 20 nt, Artificial Sequence
  Sythetic
uacaccgaggaaaugggcuc

SEQ ID NO: 3886 - RNA, 20 nt, Artificial Sequence
  Sythetic
cauccuggccuucaucaguc

SEQ ID NO: 3887 - RNA, 20 nt, Artificial Sequence
  Sythetic
ucaugcuucucaguuucuuc

SEQ ID NO: 3888 - RNA, 20 nt, Artificial Sequence
  Sythetic
gaaguguauaucugcaaaag

SEQ ID NO: 3889 - RNA, 20 nt, Artificial Sequence
  Sythetic
agggaagcgugaugacaaag

SEQ ID NO: 3890 - RNA, 20 nt, Artificial Sequence
  Sythetic
caccgaggaaaugggcucag

SEQ ID NO: 3891 - RNA, 20 nt, Artificial Sequence
  Sythetic
guacaggcugcaccugucag

SEQ ID NO: 3892 - RNA, 20 nt, Artificial Sequence
  Sythetic
aaccagcgguuaccauggag

SEQ ID NO: 3893 - RNA, 20 nt, Artificial Sequence
  Sythetic
cguggacgauggccagguag

SEQ ID NO: 3894 - RNA, 20 nt, Artificial Sequence
  Sythetic
ggaugaggacacugcuguag

SEQ ID NO: 3895 - RNA, 20 nt, Artificial Sequence
  Sythetic
gaagcuguuggcugaaaagg

SEQ ID NO: 3896 - RNA, 20 nt, Artificial Sequence
  Sythetic
agucgggaauagucagcagg

SEQ ID NO: 3897 - RNA, 20 nt, Artificial Sequence
  Sythetic
gaagaugauggaguagaugg

SEQ ID NO: 3898 - RNA, 20 nt, Artificial Sequence
  Sythetic
ccuuggccucugacuguugg

SEQ ID NO: 3899 - RNA, 20 nt, Artificial Sequence
  Sythetic
gacugaugaaggccaggaug

SEQ ID NO: 3900 - RNA, 20 nt, Artificial Sequence
  Sythetic
caucuucuuaacuggcauug

SEQ ID NO: 3901 - RNA, 20 nt, Artificial Sequence
  Sythetic
gauaacuacaccgaggaaau

SEQ ID NO: 3902 - RNA, 20 nt, Artificial Sequence
  Sythetic
uggguuaaugcuugcugaau

SEQ ID NO: 3903 - RNA, 20 nt, Artificial Sequence
  Sythetic
ugacauggacugccuugcau

SEQ ID NO: 3904 - RNA, 20 nt, Artificial Sequence
  Sythetic
uggcauugugggcaauggau

SEQ ID NO: 3905 - RNA, 20 nt, Artificial Sequence
  Sythetic
uuuucagccaacagcuuccu

SEQ ID NO: 3906 - RNA, 20 nt, Artificial Sequence
  Sythetic
guccccugagcccauuuccu

SEQ ID NO: 3907 - RNA, 20 nt, Artificial Sequence
  Sythetic
cgugaugacaaagaggaggu

SEQ ID NO: 3908 - RNA, 20 nt, Artificial Sequence
  Sythetic
aagaugauggaguagauggu

SEQ ID NO: 3909 - RNA, 20 nt, Artificial Sequence
  Sythetic
cuuccuuggccucugacugu

SEQ ID NO: 3910 - RNA, 20 nt, Artificial Sequence
  Sythetic
ucagaggccaaggaagcugu

SEQ ID NO: 3911 - RNA, 20 nt, Artificial Sequence
  Sythetic
aucuucuuaacuggcauugu

SEQ ID NO: 3912 - RNA, 17 nt, Artificial Sequence
  Sythetic
aagcugucacacuccaa

SEQ ID NO: 3913 - RNA, 17 nt, Artificial Sequence
  Sythetic
cucaagauccucuccaa

SEQ ID NO: 3914 - RNA, 17 nt, Artificial Sequence
  Sythetic
uggaaaucaucaagcaa

SEQ ID NO: 3915 - RNA, 17 nt, Artificial Sequence
  Sythetic
caagcugucacacucca

SEQ ID NO: 3916 - RNA, 17 nt, Artificial Sequence
  Sythetic
uuuuaaauuuggcucca

SEQ ID NO: 3917 - RNA, 17 nt, Artificial Sequence
  Sythetic
cuggaaaucaucaagca

SEQ ID NO: 3918 - RNA, 17 nt, Artificial Sequence
  Sythetic
gggccaccagaagcgca

SEQ ID NO: 3919 - RNA, 17 nt, Artificial Sequence
  Sythetic
ccaguuucagcacauca

SEQ ID NO: 3920 - RNA, 17 nt, Artificial Sequence
  Sythetic
ucaccucugugagcaga

SEQ ID NO: 3921 - RNA, 17 nt, Artificial Sequence
  Sythetic
gggaauagucagcagga

SEQ ID NO: 3922 - RNA, 17 nt, Artificial Sequence
  Sythetic
aaggaaagcauagagga

SEQ ID NO: 3923 - RNA, 17 nt, Artificial Sequence
  Sythetic
gauuuccaggaggauga

SEQ ID NO: 3924 - RNA, 17 nt, Artificial Sequence
  Sythetic
agcuagggccucgguga

SEQ ID NO: 3925 - RNA, 17 nt, Artificial Sequence
  Sythetic
gaugacuguggucuuga

SEQ ID NO: 3926 - RNA, 17 nt, Artificial Sequence
  Sythetic
caauaccaggcaggaua

SEQ ID NO: 3927 - RNA, 17 nt, Artificial Sequence
  Sythetic
acaguggaagaaagcua

SEQ ID NO: 3928 - RNA, 17 nt, Artificial Sequence
  Sythetic
cugaucccaauguagua

SEQ ID NO: 3929 - RNA, 17 nt, Artificial Sequence
  Sythetic
ccaugaugugcugaaac

SEQ ID NO: 3930 - RNA, 17 nt, Artificial Sequence
  Sythetic
guaguaaggcagccaac

SEQ ID NO: 3931 - RNA, 17 nt, Artificial Sequence
  Sythetic
uaaugcaauagcaggac

SEQ ID NO: 3932 - RNA, 17 nt, Artificial Sequence
  Sythetic
gacaggaugacaauacc

SEQ ID NO: 3933 - RNA, 17 nt, Artificial Sequence
  Sythetic
aacaggcgaagaaagcc

SEQ ID NO: 3934 - RNA, 17 nt, Artificial Sequence
  Sythetic
guuggccuuauccugcc

SEQ ID NO: 3935 - RNA, 17 nt, Artificial Sequence
  Sythetic
cacagucauccucaucc

SEQ ID NO: 3936 - RNA, 17 nt, Artificial Sequence
  Sythetic
cgacuccuucauccucc

SEQ ID NO: 3937 - RNA, 17 nt, Artificial Sequence
  Sythetic
cuugcuugaugauuucc

SEQ ID NO: 3938 - RNA, 17 nt, Artificial Sequence
  Sythetic
agucgggaauagucagc

SEQ ID NO: 3939 - RNA, 17 nt, Artificial Sequence
  Sythetic
gaugauaaugcaauagc

SEQ ID NO: 3940 - RNA, 17 nt, Artificial Sequence
  Sythetic
uuuacaucuguguuagc

SEQ ID NO: 3941 - RNA, 17 nt, Artificial Sequence
  Sythetic
ggaugacaauaccaggc

SEQ ID NO: 3942 - RNA, 17 nt, Artificial Sequence
  Sythetic
ggagaggaucuugaggc

SEQ ID NO: 3943 - RNA, 17 nt, Artificial Sequence
  Sythetic
cagaggugagugcgugc

SEQ ID NO: 3944 - RNA, 17 nt, Artificial Sequence
  Sythetic
uuggcaaagaugaaguc

SEQ ID NO: 3945 - RNA, 17 nt, Artificial Sequence
  Sythetic
ugagggccuugcgcuuc

SEQ ID NO: 3946 - RNA, 17 nt, Artificial Sequence
  Sythetic
agaacacugugcacaag

SEQ ID NO: 3947 - RNA, 17 nt, Artificial Sequence
  Sythetic
agucauugggguagaag

SEQ ID NO: 3948 - RNA, 17 nt, Artificial Sequence
  Sythetic
ugggguucagacaacag

SEQ ID NO: 3949 - RNA, 17 nt, Artificial Sequence
  Sythetic
ggacccucugcucacag

SEQ ID NO: 3950 - RNA, 17 nt, Artificial Sequence
  Sythetic
cucaccucugugagcag

SEQ ID NO: 3951 - RNA, 17 nt, Artificial Sequence
  Sythetic
gagugcgugcugggcag

SEQ ID NO: 3952 - RNA, 17 nt, Artificial Sequence
  Sythetic
ugaagacucagacucag

SEQ ID NO: 3953 - RNA, 17 nt, Artificial Sequence
  Sythetic
cucgcuuuccuuuggag

SEQ ID NO: 3954 - RNA, 17 nt, Artificial Sequence
  Sythetic
cuccaaggaaagcauag

SEQ ID NO: 3955 - RNA, 17 nt, Artificial Sequence
  Sythetic
guggauuuccaucaccg

SEQ ID NO: 3956 - RNA, 17 nt, Artificial Sequence
  Sythetic
cucuccaaaggaaagcg

SEQ ID NO: 3957 - RNA, 17 nt, Artificial Sequence
  Sythetic
gcuugaugauuuccagg

SEQ ID NO: 3958 - RNA, 17 nt, Artificial Sequence
  Sythetic
cgggaauagucagcagg

SEQ ID NO: 3959 - RNA, 17 nt, Artificial Sequence
  Sythetic
uccaaaggaaagcgagg

SEQ ID NO: 3960 - RNA, 17 nt, Artificial Sequence
  Sythetic
ccccaaugacuuguggg

SEQ ID NO: 3961 - RNA, 17 nt, Artificial Sequence
  Sythetic
gggccuugcgcuucugg

SEQ ID NO: 3962 - RNA, 17 nt, Artificial Sequence
  Sythetic
cgaagaaagccaggaug

SEQ ID NO: 3963 - RNA, 17 nt, Artificial Sequence
  Sythetic
ggaaagcauagaggaug

SEQ ID NO: 3964 - RNA, 17 nt, Artificial Sequence
  Sythetic
caggaugaggaugacug

SEQ ID NO: 3965 - RNA, 17 nt, Artificial Sequence
  Sythetic
cuuugccaacgucagug

SEQ ID NO: 3966 - RNA, 17 nt, Artificial Sequence
  Sythetic
ccacccacaagucauug

SEQ ID NO: 3967 - RNA, 17 nt, Artificial Sequence
  Sythetic
ucuaccccaaugacuug

SEQ ID NO: 3968 - RNA, 17 nt, Artificial Sequence
  Sythetic
cuuuggagaggaucuug

SEQ ID NO: 3969 - RNA, 17 nt, Artificial Sequence
  Sythetic
ggaugacuguggucuug

SEQ ID NO: 3970 - RNA, 17 nt, Artificial Sequence
  Sythetic
uggcugccuuacuacau

SEQ ID NO: 3971 - RNA, 17 nt, Artificial Sequence
  Sythetic
aaccacccacaagucau

SEQ ID NO: 3972 - RNA, 17 nt, Artificial Sequence
  Sythetic
aggaaagcauagaggau

SEQ ID NO: 3973 - RNA, 17 nt, Artificial Sequence
  Sythetic
gcgcuucugguggcccu

SEQ ID NO: 3974 - RNA, 17 nt, Artificial Sequence
  Sythetic
gaagaaagcuagggccu

SEQ ID NO: 3975 - RNA, 17 nt, Artificial Sequence
  Sythetic
auccucuaugcuuuccu

SEQ ID NO: 3976 - RNA, 17 nt, Artificial Sequence
  Sythetic
aacaguggaagaaagcu

SEQ ID NO: 3977 - RNA, 17 nt, Artificial Sequence
  Sythetic
cuuggagugugacagcu

SEQ ID NO: 3978 - RNA, 17 nt, Artificial Sequence
  Sythetic
agaggugagugcgugcu

SEQ ID NO: 3979 - RNA, 17 nt, Artificial Sequence
  Sythetic
guuggcaaagaugaagu

SEQ ID NO: 3980 - RNA, 17 nt, Artificial Sequence
  Sythetic
aucugccucacugacgu

SEQ ID NO: 3981 - RNA, 17 nt, Artificial Sequence
  Sythetic
uuucagcacaucauggu

SEQ ID NO: 3982 - RNA, 17 nt, Artificial Sequence
  Sythetic
uggcuuucuucgccugu

SEQ ID NO: 3983 - RNA, 17 nt, Artificial Sequence
  Sythetic
cuaccccaaugacuugu

SEQ ID NO: 3984 - RNA, 17 nt, Artificial Sequence
  Sythetic
ggcagagguuuuaaauu

SEQ ID NO: 3985 - RNA, 17 nt, Artificial Sequence
  Sythetic
ggcugccuuacuacauu

SEQ ID NO: 3986 - RNA, 17 nt, Artificial Sequence
  Sythetic
accacccacaagucauu

SEQ ID NO: 3987 - RNA, 17 nt, Artificial Sequence
  Sythetic
uccaccucgcuuuccuu

SEQ ID NO: 3988 - RNA, 20 nt, Artificial Sequence
  Sythetic
uccaagcugucacacuccaa

SEQ ID NO: 3989 - RNA, 20 nt, Artificial Sequence
  Sythetic
agccucaagauccucuccaa

SEQ ID NO: 3990 - RNA, 20 nt, Artificial Sequence
  Sythetic
uccuggaaaucaucaagcaa

SEQ ID NO: 3991 - RNA, 20 nt, Artificial Sequence
  Sythetic
cuccaagcugucacacucca

SEQ ID NO: 3992 - RNA, 20 nt, Artificial Sequence
  Sythetic
agguuuuaaauuuggcucca

SEQ ID NO: 3993 - RNA, 20 nt, Artificial Sequence
  Sythetic
cuccuggaaaucaucaagca

SEQ ID NO: 3994 - RNA, 20 nt, Artificial Sequence
  Sythetic
caagggccaccagaagcgca

SEQ ID NO: 3995 - RNA, 20 nt, Artificial Sequence
  Sythetic
guuccaguuucagcacauca

SEQ ID NO: 3996 - RNA, 20 nt, Artificial Sequence
  Sythetic
cacucaccucugugagcaga

SEQ ID NO: 3997 - RNA, 20 nt, Artificial Sequence
  Sythetic
gucgggaauagucagcagga

SEQ ID NO: 3998 - RNA, 20 nt, Artificial Sequence
  Sythetic
uccaaggaaagcauagagga

SEQ ID NO: 3999 - RNA, 20 nt, Artificial Sequence
  Sythetic
gaugauuuccaggaggauga

SEQ ID NO: 4000 - RNA, 20 nt, Artificial Sequence
  Sythetic
gaaagcuagggccucgguga

SEQ ID NO: 4001 - RNA, 20 nt, Artificial Sequence
  Sythetic
gaggaugacuguggucuuga

SEQ ID NO: 4002 - RNA, 20 nt, Artificial Sequence
  Sythetic
ugacaauaccaggcaggaua

SEQ ID NO: 4003 - RNA, 20 nt, Artificial Sequence
  Sythetic
acaacaguggaagaaagcua

SEQ ID NO: 4004 - RNA, 20 nt, Artificial Sequence
  Sythetic
augcugaucccaauguagua

SEQ ID NO: 4005 - RNA, 20 nt, Artificial Sequence
  Sythetic
caaccaugaugugcugaaac

SEQ ID NO: 4006 - RNA, 20 nt, Artificial Sequence
  Sythetic
aauguaguaaggcagccaac

SEQ ID NO: 4007 - RNA, 20 nt, Artificial Sequence
  Sythetic
ugauaaugcaauagcaggac

SEQ ID NO: 4008 - RNA, 20 nt, Artificial Sequence
  Sythetic
caggacaggaugacaauacc

SEQ ID NO: 4009 - RNA, 20 nt, Artificial Sequence
  Sythetic
gccaacaggcgaagaaagcc

SEQ ID NO: 4010 - RNA, 20 nt, Artificial Sequence
  Sythetic
augguuggccuuauccugcc

SEQ ID NO: 4011 - RNA, 20 nt, Artificial Sequence
  Sythetic
gaccacagucauccucaucc

SEQ ID NO: 4012 - RNA, 20 nt, Artificial Sequence
  Sythetic
caucgacuccuucauccucc

SEQ ID NO: 4013 - RNA, 20 nt, Artificial Sequence
  Sythetic
acccuugcuugaugauuucc

SEQ ID NO: 4014 - RNA, 20 nt, Artificial Sequence
  Sythetic
ugaagucgggaauagucagc

SEQ ID NO: 4015 - RNA, 20 nt, Artificial Sequence
  Sythetic
ggagaugauaaugcaauagc

SEQ ID NO: 4016 - RNA, 20 nt, Artificial Sequence
  Sythetic
ucuuuuacaucuguguuagc

SEQ ID NO: 4017 - RNA, 20 nt, Artificial Sequence
  Sythetic
acaggaugacaauaccaggc

SEQ ID NO: 4018 - RNA, 20 nt, Artificial Sequence
  Sythetic
uuuggagaggaucuugaggc

SEQ ID NO: 4019 - RNA, 20 nt, Artificial Sequence
  Sythetic
ucacagaggugagugcgugc

SEQ ID NO: 4020 - RNA, 20 nt, Artificial Sequence
  Sythetic
acguuggcaaagaugaaguc

SEQ ID NO: 4021 - RNA, 20 nt, Artificial Sequence
  Sythetic
ucuugagggccuugcgcuuc

SEQ ID NO: 4022 - RNA, 20 nt, Artificial Sequence
  Sythetic
uugagaacacugugcacaag

SEQ ID NO: 4023 - RNA, 20 nt, Artificial Sequence
  Sythetic
acaagucauugggguagaag

SEQ ID NO: 4024 - RNA, 20 nt, Artificial Sequence
  Sythetic
ggaugggguucagacaacag

SEQ ID NO: 4025 - RNA, 20 nt, Artificial Sequence
  Sythetic
gcuggacccucugcucacag

SEQ ID NO: 4026 - RNA, 20 nt, Artificial Sequence
  Sythetic
gcacucaccucugugagcag

SEQ ID NO: 4027 - RNA, 20 nt, Artificial Sequence
  Sythetic
ggugagugcgugcugggcag

SEQ ID NO: 4028 - RNA, 20 nt, Artificial Sequence
  Sythetic
acuugaagacucagacucag

SEQ ID NO: 4029 - RNA, 20 nt, Artificial Sequence
  Sythetic
caccucgcuuuccuuuggag

SEQ ID NO: 4030 - RNA, 20 nt, Artificial Sequence
  Sythetic
uggcuccaaggaaagcauag

SEQ ID NO: 4031 - RNA, 20 nt, Artificial Sequence
  Sythetic
caaguggauuuccaucaccg

SEQ ID NO: 4032 - RNA, 20 nt, Artificial Sequence
  Sythetic
auccucuccaaaggaaagcg

SEQ ID NO: 4033 - RNA, 20 nt, Artificial Sequence
  Sythetic
cuugcuugaugauuuccagg

SEQ ID NO: 4034 - RNA, 20 nt, Artificial Sequence
  Sythetic
agucgggaauagucagcagg

SEQ ID NO: 4035 - RNA, 20 nt, Artificial Sequence
  Sythetic
cucuccaaaggaaagcgagg

SEQ ID NO: 4036 - RNA, 20 nt, Artificial Sequence
  Sythetic
cuaccccaaugacuuguggg

SEQ ID NO: 4037 - RNA, 20 nt, Artificial Sequence
  Sythetic
ugagggccuugcgcuucugg

SEQ ID NO: 4038 - RNA, 20 nt, Artificial Sequence
  Sythetic
aggcgaagaaagccaggaug

SEQ ID NO: 4039 - RNA, 20 nt, Artificial Sequence
  Sythetic
caaggaaagcauagaggaug

SEQ ID NO: 4040 - RNA, 20 nt, Artificial Sequence
  Sythetic
agccaggaugaggaugacug

SEQ ID NO: 4041 - RNA, 20 nt, Artificial Sequence
  Sythetic
caucuuugccaacgucagug

SEQ ID NO: 4042 - RNA, 20 nt, Artificial Sequence
  Sythetic
caaccacccacaagucauug

SEQ ID NO: 4043 - RNA, 20 nt, Artificial Sequence
  Sythetic
gcuucuaccccaaugacuug

SEQ ID NO: 4044 - RNA, 20 nt, Artificial Sequence
  Sythetic
uuccuuuggagaggaucuug

SEQ ID NO: 4045 - RNA, 20 nt, Artificial Sequence
  Sythetic
ugaggaugacuguggucuug

SEQ ID NO: 4046 - RNA, 20 nt, Artificial Sequence
  Sythetic
uguuggcugccuuacuacau

SEQ ID NO: 4047 - RNA, 20 nt, Artificial Sequence
  Sythetic
cacaaccacccacaagucau

SEQ ID NO: 4048 - RNA, 20 nt, Artificial Sequence
  Sythetic
ccaaggaaagcauagaggau

SEQ ID NO: 4049 - RNA, 20 nt, Artificial Sequence
  Sythetic
cuugcgcuucugguggcccu

SEQ ID NO: 4050 - RNA, 20 nt, Artificial Sequence
  Sythetic
guggaagaaagcuagggccu

SEQ ID NO: 4051 - RNA, 20 nt, Artificial Sequence
  Sythetic
cccauccucuaugcuuuccu

SEQ ID NO: 4052 - RNA, 20 nt, Artificial Sequence
  Sythetic
gacaacaguggaagaaagcu

SEQ ID NO: 4053 - RNA, 20 nt, Artificial Sequence
  Sythetic
gcccuuggagugugacagcu

SEQ ID NO: 4054 - RNA, 20 nt, Artificial Sequence
  Sythetic
cacagaggugagugcgugcu

SEQ ID NO: 4055 - RNA, 20 nt, Artificial Sequence
  Sythetic
gacguuggcaaagaugaagu

SEQ ID NO: 4056 - RNA, 20 nt, Artificial Sequence
  Sythetic
gucaucugccucacugacgu

SEQ ID NO: 4057 - RNA, 20 nt, Artificial Sequence
  Sythetic
caguuucagcacaucauggu

SEQ ID NO: 4058 - RNA, 20 nt, Artificial Sequence
  Sythetic
uccuggcuuucuucgccugu

SEQ ID NO: 4059 - RNA, 20 nt, Artificial Sequence
  Sythetic
cuucuaccccaaugacuugu

SEQ ID NO: 4060 - RNA, 20 nt, Artificial Sequence
  Sythetic
cugggcagagguuuuaaauu

SEQ ID NO: 4061 - RNA, 20 nt, Artificial Sequence
  Sythetic
guuggcugccuuacuacauu

SEQ ID NO: 4062 - RNA, 20 nt, Artificial Sequence
  Sythetic
acaaccacccacaagucauu

SEQ ID NO: 4063 - RNA, 20 nt, Artificial Sequence
  Sythetic
auguccaccucgcuuuccuu

SEQ ID NO: 4064 - RNA, 21 nt, Artificial Sequence
  Sythetic
uuagcauuuucuucacggaaa

SEQ ID NO: 4065 - RNA, 22 nt, Artificial Sequence
  Sythetic
auuagcauuuucuucacggaaa

SEQ ID NO: 4066 - RNA, 23 nt, Artificial Sequence
  Sythetic
aauuagcauuuucuucacggaaa

SEQ ID NO: 4067 - RNA, 24 nt, Artificial Sequence
  Sythetic
aaauuagcauuuucuucacggaaa

SEQ ID NO: 4068 - RNA, 21 nt, Artificial Sequence
  Sythetic
guauaucugcaaaagaggcaa

SEQ ID NO: 4069 - RNA, 22 nt, Artificial Sequence
  Sythetic
uguauaucugcaaaagaggcaa

SEQ ID NO: 4070 - RNA, 23 nt, Artificial Sequence
  Sythetic
guguauaucugcaaaagaggcaa

SEQ ID NO: 4071 - RNA, 24 nt, Artificial Sequence
  Sythetic
aguguauaucugcaaaagaggcaa

SEQ ID NO: 4072 - RNA, 18 nt, Artificial Sequence
  Sythetic
ggaaacaggguuccuuca

SEQ ID NO: 4073 - RNA, 19 nt, Artificial Sequence
  Sythetic
cggaaacaggguuccuuca

SEQ ID NO: 4074 - RNA, 20 nt, Artificial Sequence
  Sythetic
acggaaacaggguuccuuca

SEQ ID NO: 4075 - RNA, 21 nt, Artificial Sequence
  Sythetic
cacggaaacaggguuccuuca

SEQ ID NO: 4076 - RNA, 22 nt, Artificial Sequence
  Sythetic
ucacggaaacaggguuccuuca

SEQ ID NO: 4077 - RNA, 23 nt, Artificial Sequence
  Sythetic
uucacggaaacaggguuccuuca

SEQ ID NO: 4078 - RNA, 24 nt, Artificial Sequence
  Sythetic
cuucacggaaacaggguuccuuca

SEQ ID NO: 4079 - RNA, 21 nt, Artificial Sequence
  Sythetic
caaugccaguuaagaagauga

SEQ ID NO: 4080 - RNA, 22 nt, Artificial Sequence
  Sythetic
acaaugccaguuaagaagauga

SEQ ID NO: 4081 - RNA, 23 nt, Artificial Sequence
  Sythetic
cacaaugccaguuaagaagauga

SEQ ID NO: 4082 - RNA, 24 nt, Artificial Sequence
  Sythetic
ccacaaugccaguuaagaagauga

SEQ ID NO: 4083 - RNA, 18 nt, Artificial Sequence
  Sythetic
cuucugguaacccaugac

SEQ ID NO: 4084 - RNA, 19 nt, Artificial Sequence
  Sythetic
ucuucugguaacccaugac

SEQ ID NO: 4085 - RNA, 20 nt, Artificial Sequence
  Sythetic
uucuucugguaacccaugac

SEQ ID NO: 4086 - RNA, 21 nt, Artificial Sequence
  Sythetic
uuucuucugguaacccaugac

SEQ ID NO: 4087 - RNA, 22 nt, Artificial Sequence
  Sythetic
guuucuucugguaacccaugac

SEQ ID NO: 4088 - RNA, 23 nt, Artificial Sequence
  Sythetic
aguuucuucugguaacccaugac

SEQ ID NO: 4089 - RNA, 24 nt, Artificial Sequence
  Sythetic
caguuucuucugguaacccaugac

SEQ ID NO: 4090 - RNA, 18 nt, Artificial Sequence
  Sythetic
guccagacugaugaaggc

SEQ ID NO: 4091 - RNA, 19 nt, Artificial Sequence
  Sythetic
gguccagacugaugaaggc

SEQ ID NO: 4092 - RNA, 20 nt, Artificial Sequence
  Sythetic
cgguccagacugaugaaggc

SEQ ID NO: 4093 - RNA, 21 nt, Artificial Sequence
  Sythetic
gcgguccagacugaugaaggc

SEQ ID NO: 4094 - RNA, 22 nt, Artificial Sequence
  Sythetic
agcgguccagacugaugaaggc

SEQ ID NO: 4095 - RNA, 23 nt, Artificial Sequence
  Sythetic
uagcgguccagacugaugaaggc

SEQ ID NO: 4096 - RNA, 24 nt, Artificial Sequence
  Sythetic
guagcgguccagacugaugaaggc

SEQ ID NO: 4097 - RNA, 18 nt, Artificial Sequence
  Sythetic
aauagucagcaggagggc

SEQ ID NO: 4098 - RNA, 19 nt, Artificial Sequence
  Sythetic
gaauagucagcaggagggc

SEQ ID NO: 4099 - RNA, 20 nt, Artificial Sequence
  Sythetic
ggaauagucagcaggagggc

SEQ ID NO: 4100 - RNA, 21 nt, Artificial Sequence
  Sythetic
gggaauagucagcaggagggc

SEQ ID NO: 4101 - RNA, 22 nt, Artificial Sequence
  Sythetic
cgggaauagucagcaggagggc

SEQ ID NO: 4102 - RNA, 23 nt, Artificial Sequence
  Sythetic
ucgggaauagucagcaggagggc

SEQ ID NO: 4103 - RNA, 24 nt, Artificial Sequence
  Sythetic
gucgggaauagucagcaggagggc

SEQ ID NO: 4104 - RNA, 21 nt, Artificial Sequence
  Sythetic
uuaaugcuugcugaauuggaa

SEQ ID NO: 4105 - RNA, 22 nt, Artificial Sequence
  Sythetic
guuaaugcuugcugaauuggaa

SEQ ID NO: 4106 - RNA, 23 nt, Artificial Sequence
  Sythetic
gguuaaugcuugcugaauuggaa

SEQ ID NO: 4107 - RNA, 24 nt, Artificial Sequence
  Sythetic
ggguuaaugcuugcugaauuggaa

SEQ ID NO: 4108 - RNA, 18 nt, Artificial Sequence
  Sythetic
uaacuggcauugugggca

SEQ ID NO: 4109 - RNA, 19 nt, Artificial Sequence
  Sythetic
uuaacuggcauugugggca

SEQ ID NO: 4110 - RNA, 20 nt, Artificial Sequence
  Sythetic
cuuaacuggcauugugggca

SEQ ID NO: 4111 - RNA, 21 nt, Artificial Sequence
  Sythetic
agaaccagcgguuaccaugga

SEQ ID NO: 4112 - RNA, 22 nt, Artificial Sequence
  Sythetic
gagaaccagcgguuaccaugga

SEQ ID NO: 4113 - RNA, 23 nt, Artificial Sequence
  Sythetic
ggagaaccagcgguuaccaugga

SEQ ID NO: 4114 - RNA, 24 nt, Artificial Sequence
  Sythetic
uggagaaccagcgguuaccaugga

SEQ ID NO: 4115 - RNA, 21 nt, Artificial Sequence
  Sythetic
aauggauuggucauccugguc

SEQ ID NO: 4116 - RNA, 22 nt, Artificial Sequence
  Sythetic
caauggauuggucauccugguc

SEQ ID NO: 4117 - RNA, 23 nt, Artificial Sequence
  Sythetic
gcaauggauuggucauccugguc

SEQ ID NO: 4118 - RNA, 24 nt, Artificial Sequence
  Sythetic
ggcaauggauuggucauccugguc

SEQ ID NO: 4119 - RNA, 18 nt, Artificial Sequence
  Sythetic
gguggucuauguuggcgu

SEQ ID NO: 4120 - RNA, 19 nt, Artificial Sequence
  Sythetic
agguggucuauguuggcgu

SEQ ID NO: 4121 - RNA, 20 nt, Artificial Sequence
  Sythetic
aagguggucuauguuggcgu

SEQ ID NO: 4122 - RNA, 21 nt, Artificial Sequence
  Sythetic
aaagguggucuauguuggcgu

SEQ ID NO: 4123 - RNA, 22 nt, Artificial Sequence
  Sythetic
aaaagguggucuauguuggcgu

SEQ ID NO: 4124 - RNA, 23 nt, Artificial Sequence
  Sythetic
gaaaagguggucuauguuggcgu

SEQ ID NO: 4125 - RNA, 24 nt, Artificial Sequence
  Sythetic
ugaaaagguggucuauguuggcgu

SEQ ID NO: 4126 - RNA, 18 nt, Artificial Sequence
  Sythetic
gcauuuucuucacggaaa

SEQ ID NO: 4127 - RNA, 19 nt, Artificial Sequence
  Sythetic
agcauuuucuucacggaaa

SEQ ID NO: 4128 - RNA, 20 nt, Artificial Sequence
  Sythetic
uagcauuuucuucacggaaa

SEQ ID NO: 4129 - RNA, 18 nt, Artificial Sequence
  Sythetic
uaucugcaaaagaggcaa

SEQ ID NO: 4130 - RNA, 19 nt, Artificial Sequence
  Sythetic
auaucugcaaaagaggcaa

SEQ ID NO: 4131 - RNA, 20 nt, Artificial Sequence
  Sythetic
uauaucugcaaaagaggcaa

SEQ ID NO: 4132 - RNA, 18 nt, Artificial Sequence
  Sythetic
ugccaguuaagaagauga

SEQ ID NO: 4133 - RNA, 19 nt, Artificial Sequence
  Sythetic
augccaguuaagaagauga

SEQ ID NO: 4134 - RNA, 20 nt, Artificial Sequence
  Sythetic
aaugccaguuaagaagauga

SEQ ID NO: 4135 - RNA, 18 nt, Artificial Sequence
  Sythetic
augcuugcugaauuggaa

SEQ ID NO: 4136 - RNA, 19 nt, Artificial Sequence
  Sythetic
aaugcuugcugaauuggaa

SEQ ID NO: 4137 - RNA, 20 nt, Artificial Sequence
  Sythetic
uaaugcuugcugaauuggaa

SEQ ID NO: 4138 - RNA, 21 nt, Artificial Sequence
  Sythetic
ucuuaacuggcauugugggca

SEQ ID NO: 4139 - RNA, 22 nt, Artificial Sequence
  Sythetic
uucuuaacuggcauugugggca

SEQ ID NO: 4140 - RNA, 23 nt, Artificial Sequence
  Sythetic
cuucuuaacuggcauugugggca

SEQ ID NO: 4141 - RNA, 24 nt, Artificial Sequence
  Sythetic
ucuucuuaacuggcauugugggca

SEQ ID NO: 4142 - RNA, 18 nt, Artificial Sequence
  Sythetic
accagcgguuaccaugga

SEQ ID NO: 4143 - RNA, 19 nt, Artificial Sequence
  Sythetic
aaccagcgguuaccaugga

SEQ ID NO: 4144 - RNA, 20 nt, Artificial Sequence
  Sythetic
gaaccagcgguuaccaugga

SEQ ID NO: 4145 - RNA, 18 nt, Artificial Sequence
  Sythetic
ggauuggucauccugguc

SEQ ID NO: 4146 - RNA, 19 nt, Artificial Sequence
  Sythetic
uggauuggucauccugguc

SEQ ID NO: 4147 - RNA, 20 nt, Artificial Sequence
  Sythetic
auggauuggucauccugguc

SEQ ID NO: 4148 - RNA, 18 nt, Artificial Sequence
  Sythetic
gggaagcgugaugacaaa

SEQ ID NO: 4149 - RNA, 19 nt, Artificial Sequence
  Sythetic
agggaagcgugaugacaaa

SEQ ID NO: 4150 - RNA, 20 nt, Artificial Sequence
  Sythetic
aagggaagcgugaugacaaa

SEQ ID NO: 4151 - RNA, 21 nt, Artificial Sequence
  Sythetic
gaagggaagcgugaugacaaa

SEQ ID NO: 4152 - RNA, 22 nt, Artificial Sequence
  Sythetic
agaagggaagcgugaugacaaa

SEQ ID NO: 4153 - RNA, 23 nt, Artificial Sequence
  Sythetic
cagaagggaagcgugaugacaaa

SEQ ID NO: 4154 - RNA, 24 nt, Artificial Sequence
  Sythetic
ccagaagggaagcgugaugacaaa

SEQ ID NO: 4155 - RNA, 18 nt, Artificial Sequence
  Sythetic
ugacaaagcagguugaaa

SEQ ID NO: 4156 - RNA, 19 nt, Artificial Sequence
  Sythetic
augacaaagcagguugaaa

SEQ ID NO: 4157 - RNA, 20 nt, Artificial Sequence
  Sythetic
uaugacaaagcagguugaaa

SEQ ID NO: 4158 - RNA, 18 nt, Artificial Sequence
  Sythetic
ugaaguguauaucugcaa

SEQ ID NO: 4159 - RNA, 19 nt, Artificial Sequence
  Sythetic
cugaaguguauaucugcaa

SEQ ID NO: 4160 - RNA, 20 nt, Artificial Sequence
  Sythetic
ucugaaguguauaucugcaa

SEQ ID NO: 4161 - RNA, 21 nt, Artificial Sequence
  Sythetic
aucugaaguguauaucugcaa

SEQ ID NO: 4162 - RNA, 22 nt, Artificial Sequence
  Sythetic
uaucugaaguguauaucugcaa

SEQ ID NO: 4163 - RNA, 23 nt, Artificial Sequence
  Sythetic
uuaucugaaguguauaucugcaa

SEQ ID NO: 4164 - RNA, 24 nt, Artificial Sequence
  Sythetic
guuaucugaaguguauaucugcaa

SEQ ID NO: 4165 - RNA, 18 nt, Artificial Sequence
  Sythetic
ggcaucaacugcccagaa

SEQ ID NO: 4166 - RNA, 19 nt, Artificial Sequence
  Sythetic
cggcaucaacugcccagaa

SEQ ID NO: 4167 - RNA, 20 nt, Artificial Sequence
  Sythetic
acggcaucaacugcccagaa

SEQ ID NO: 4168 - RNA, 21 nt, Artificial Sequence
  Sythetic
cacggcaucaacugcccagaa

SEQ ID NO: 4169 - RNA, 22 nt, Artificial Sequence
  Sythetic
ccacggcaucaacugcccagaa

SEQ ID NO: 4170 - RNA, 23 nt, Artificial Sequence
  Sythetic
gccacggcaucaacugcccagaa

SEQ ID NO: 4171 - RNA, 24 nt, Artificial Sequence
  Sythetic
ugccacggcaucaacugcccagaa

SEQ ID NO: 4172 - RNA, 18 nt, Artificial Sequence
  Sythetic
aagggaagcgugaugaca

SEQ ID NO: 4173 - RNA, 19 nt, Artificial Sequence
  Sythetic
gaagggaagcgugaugaca

SEQ ID NO: 4174 - RNA, 20 nt, Artificial Sequence
  Sythetic
agaagggaagcgugaugaca

SEQ ID NO: 4175 - RNA, 21 nt, Artificial Sequence
  Sythetic
cagaagggaagcgugaugaca

SEQ ID NO: 4176 - RNA, 22 nt, Artificial Sequence
  Sythetic
ccagaagggaagcgugaugaca

SEQ ID NO: 4177 - RNA, 23 nt, Artificial Sequence
  Sythetic
cccagaagggaagcgugaugaca

SEQ ID NO: 4178 - RNA, 24 nt, Artificial Sequence
  Sythetic
gcccagaagggaagcgugaugaca

SEQ ID NO: 4179 - RNA, 18 nt, Artificial Sequence
  Sythetic
auaucugcaaaagaggca

SEQ ID NO: 4180 - RNA, 19 nt, Artificial Sequence
  Sythetic
uauaucugcaaaagaggca

SEQ ID NO: 4181 - RNA, 20 nt, Artificial Sequence
  Sythetic
guauaucugcaaaagaggca

SEQ ID NO: 4182 - RNA, 21 nt, Artificial Sequence
  Sythetic
uguauaucugcaaaagaggca

SEQ ID NO: 4183 - RNA, 22 nt, Artificial Sequence
  Sythetic
guguauaucugcaaaagaggca

SEQ ID NO: 4184 - RNA, 23 nt, Artificial Sequence
  Sythetic
aguguauaucugcaaaagaggca

SEQ ID NO: 4185 - RNA, 24 nt, Artificial Sequence
  Sythetic
aaguguauaucugcaaaagaggca

SEQ ID NO: 4186 - RNA, 18 nt, Artificial Sequence
  Sythetic
gacauggacugccuugca

SEQ ID NO: 4187 - RNA, 19 nt, Artificial Sequence
  Sythetic
ugacauggacugccuugca

SEQ ID NO: 4188 - RNA, 20 nt, Artificial Sequence
  Sythetic
augacauggacugccuugca

SEQ ID NO: 4189 - RNA, 21 nt, Artificial Sequence
  Sythetic
gaugacauggacugccuugca

SEQ ID NO: 4190 - RNA, 22 nt, Artificial Sequence
  Sythetic
agaugacauggacugccuugca

SEQ ID NO: 4191 - RNA, 23 nt, Artificial Sequence
  Sythetic
uagaugacauggacugccuugca

SEQ ID NO: 4192 - RNA, 24 nt, Artificial Sequence
  Sythetic
guagaugacauggacugccuugca

SEQ ID NO: 4193 - RNA, 18 nt, Artificial Sequence
  Sythetic
aaauuagcauuuucuuca

SEQ ID NO: 4194 - RNA, 19 nt, Artificial Sequence
  Sythetic
gaaauuagcauuuucuuca

SEQ ID NO: 4195 - RNA, 20 nt, Artificial Sequence
  Sythetic
ugaaauuagcauuuucuuca

SEQ ID NO: 4196 - RNA, 21 nt, Artificial Sequence
  Sythetic
uugaaauuagcauuuucuuca

SEQ ID NO: 4197 - RNA, 22 nt, Artificial Sequence
  Sythetic
auugaaauuagcauuuucuuca

SEQ ID NO: 4198 - RNA, 23 nt, Artificial Sequence
  Sythetic
uauugaaauuagcauuuucuuca

SEQ ID NO: 4199 - RNA, 24 nt, Artificial Sequence
  Sythetic
uuauugaaauuagcauuuucuuca

SEQ ID NO: 4200 - RNA, 18 nt, Artificial Sequence
  Sythetic
cggcaucaacugcccaga

SEQ ID NO: 4201 - RNA, 19 nt, Artificial Sequence
  Sythetic
acggcaucaacugcccaga

SEQ ID NO: 4202 - RNA, 20 nt, Artificial Sequence
  Sythetic
cacggcaucaacugcccaga

SEQ ID NO: 4203 - RNA, 21 nt, Artificial Sequence
  Sythetic
ccacggcaucaacugcccaga

SEQ ID NO: 4204 - RNA, 22 nt, Artificial Sequence
  Sythetic
gccacggcaucaacugcccaga

SEQ ID NO: 4205 - RNA, 23 nt, Artificial Sequence
  Sythetic
ugccacggcaucaacugcccaga

SEQ ID NO: 4206 - RNA, 24 nt, Artificial Sequence
  Sythetic
uugccacggcaucaacugcccaga

SEQ ID NO: 4207 - RNA, 18 nt, Artificial Sequence
  Sythetic
ugcaaaagaggcaaagga

SEQ ID NO: 4208 - RNA, 19 nt, Artificial Sequence
  Sythetic
cugcaaaagaggcaaagga

SEQ ID NO: 4209 - RNA, 20 nt, Artificial Sequence
  Sythetic
ucugcaaaagaggcaaagga

SEQ ID NO: 4210 - RNA, 21 nt, Artificial Sequence
  Sythetic
aucugcaaaagaggcaaagga

SEQ ID NO: 4211 - RNA, 22 nt, Artificial Sequence
  Sythetic
uaucugcaaaagaggcaaagga

SEQ ID NO: 4212 - RNA, 23 nt, Artificial Sequence
  Sythetic
auaucugcaaaagaggcaaagga

SEQ ID NO: 4213 - RNA, 24 nt, Artificial Sequence
  Sythetic
uauaucugcaaaagaggcaaagga

SEQ ID NO: 4214 - RNA, 18 nt, Artificial Sequence
  Sythetic
gugggcaggaagauuuua

SEQ ID NO: 4215 - RNA, 19 nt, Artificial Sequence
  Sythetic
ggugggcaggaagauuuua

SEQ ID NO: 4216 - RNA, 20 nt, Artificial Sequence
  Sythetic
uggugggcaggaagauuuua

SEQ ID NO: 4217 - RNA, 21 nt, Artificial Sequence
  Sythetic
auggugggcaggaagauuuua

SEQ ID NO: 4218 - RNA, 22 nt, Artificial Sequence
  Sythetic
gauggugggcaggaagauuuua

SEQ ID NO: 4219 - RNA, 23 nt, Artificial Sequence
  Sythetic
agauggugggcaggaagauuuua

SEQ ID NO: 4220 - RNA, 24 nt, Artificial Sequence
  Sythetic
uagauggugggcaggaagauuuua

SEQ ID NO: 4221 - RNA, 18 nt, Artificial Sequence
  Sythetic
guugacuguguagaugac

SEQ ID NO: 4222 - RNA, 19 nt, Artificial Sequence
  Sythetic
gguugacuguguagaugac

SEQ ID NO: 4223 - RNA, 20 nt, Artificial Sequence
  Sythetic
agguugacuguguagaugac

SEQ ID NO: 4224 - RNA, 21 nt, Artificial Sequence
  Sythetic
gagguugacuguguagaugac

SEQ ID NO: 4225 - RNA, 22 nt, Artificial Sequence
  Sythetic
agagguugacuguguagaugac

SEQ ID NO: 4226 - RNA, 23 nt, Artificial Sequence
  Sythetic
uagagguugacuguguagaugac

SEQ ID NO: 4227 - RNA, 24 nt, Artificial Sequence
  Sythetic
guagagguugacuguguagaugac

SEQ ID NO: 4228 - RNA, 18 nt, Artificial Sequence
  Sythetic
ucauggagucauaguccc

SEQ ID NO: 4229 - RNA, 19 nt, Artificial Sequence
  Sythetic
uucauggagucauaguccc

SEQ ID NO: 4230 - RNA, 20 nt, Artificial Sequence
  Sythetic
cuucauggagucauaguccc

SEQ ID NO: 4231 - RNA, 21 nt, Artificial Sequence
  Sythetic
ccuucauggagucauaguccc

SEQ ID NO: 4232 - RNA, 22 nt, Artificial Sequence
  Sythetic
uccuucauggagucauaguccc

SEQ ID NO: 4233 - RNA, 23 nt, Artificial Sequence
  Sythetic
uuccuucauggagucauaguccc

SEQ ID NO: 4234 - RNA, 24 nt, Artificial Sequence
  Sythetic
guuccuucauggagucauaguccc

SEQ ID NO: 4235 - RNA, 18 nt, Artificial Sequence
  Sythetic
gccacggcaucaacugcc

SEQ ID NO: 4236 - RNA, 19 nt, Artificial Sequence
  Sythetic
ugccacggcaucaacugcc

SEQ ID NO: 4237 - RNA, 20 nt, Artificial Sequence
  Sythetic
uugccacggcaucaacugcc

SEQ ID NO: 4238 - RNA, 21 nt, Artificial Sequence
  Sythetic
uuugccacggcaucaacugcc

SEQ ID NO: 4239 - RNA, 22 nt, Artificial Sequence
  Sythetic
guuugccacggcaucaacugcc

SEQ ID NO: 4240 - RNA, 23 nt, Artificial Sequence
  Sythetic
aguuugccacggcaucaacugcc

SEQ ID NO: 4241 - RNA, 24 nt, Artificial Sequence
  Sythetic
caguuugccacggcaucaacugcc

SEQ ID NO: 4242 - RNA, 18 nt, Artificial Sequence
  Sythetic
aagucgggaauagucagc

SEQ ID NO: 4243 - RNA, 19 nt, Artificial Sequence
  Sythetic
gaagucgggaauagucagc

SEQ ID NO: 4244 - RNA, 20 nt, Artificial Sequence
  Sythetic
ugaagucgggaauagucagc

SEQ ID NO: 4245 - RNA, 18 nt, Artificial Sequence
  Sythetic
auggaguagauggugggc

SEQ ID NO: 4246 - RNA, 19 nt, Artificial Sequence
  Sythetic
gauggaguagauggugggc

SEQ ID NO: 4247 - RNA, 20 nt, Artificial Sequence
  Sythetic
ugauggaguagauggugggc

SEQ ID NO: 4248 - RNA, 21 nt, Artificial Sequence
  Sythetic
augauggaguagauggugggc

SEQ ID NO: 4249 - RNA, 22 nt, Artificial Sequence
  Sythetic
gaugauggaguagauggugggc

SEQ ID NO: 4250 - RNA, 23 nt, Artificial Sequence
  Sythetic
agaugauggaguagauggugggc

SEQ ID NO: 4251 - RNA, 24 nt, Artificial Sequence
  Sythetic
aagaugauggaguagauggugggc

SEQ ID NO: 4252 - RNA, 18 nt, Artificial Sequence
  Sythetic
ccucugacuguugguggc

SEQ ID NO: 4253 - RNA, 19 nt, Artificial Sequence
  Sythetic
gccucugacuguugguggc

SEQ ID NO: 4254 - RNA, 20 nt, Artificial Sequence
  Sythetic
ggccucugacuguugguggc

SEQ ID NO: 4255 - RNA, 21 nt, Artificial Sequence
  Sythetic
uggccucugacuguugguggc

SEQ ID NO: 4256 - RNA, 22 nt, Artificial Sequence
  Sythetic
uuggccucugacuguugguggc

SEQ ID NO: 4257 - RNA, 23 nt, Artificial Sequence
  Sythetic
cuuggccucugacuguugguggc

SEQ ID NO: 4258 - RNA, 24 nt, Artificial Sequence
  Sythetic
ccuuggccucugacuguugguggc

SEQ ID NO: 4259 - RNA, 18 nt, Artificial Sequence
  Sythetic
cggaaacaggguuccuuc

SEQ ID NO: 4260 - RNA, 19 nt, Artificial Sequence
  Sythetic
acggaaacaggguuccuuc

SEQ ID NO: 4261 - RNA, 20 nt, Artificial Sequence
  Sythetic
cacggaaacaggguuccuuc

SEQ ID NO: 4262 - RNA, 21 nt, Artificial Sequence
  Sythetic
ucacggaaacaggguuccuuc

SEQ ID NO: 4263 - RNA, 22 nt, Artificial Sequence
  Sythetic
uucacggaaacaggguuccuuc

SEQ ID NO: 4264 - RNA, 23 nt, Artificial Sequence
  Sythetic
cuucacggaaacaggguuccuuc

SEQ ID NO: 4265 - RNA, 24 nt, Artificial Sequence
  Sythetic
ucuucacggaaacaggguuccuuc

SEQ ID NO: 4266 - RNA, 18 nt, Artificial Sequence
  Sythetic
gaaauuagcauuuucuuc

SEQ ID NO: 4267 - RNA, 19 nt, Artificial Sequence
  Sythetic
ugaaauuagcauuuucuuc

SEQ ID NO: 4268 - RNA, 20 nt, Artificial Sequence
  Sythetic
uugaaauuagcauuuucuuc

SEQ ID NO: 4269 - RNA, 21 nt, Artificial Sequence
  Sythetic
auugaaauuagcauuuucuuc

SEQ ID NO: 4270 - RNA, 22 nt, Artificial Sequence
  Sythetic
uauugaaauuagcauuuucuuc

SEQ ID NO: 4271 - RNA, 23 nt, Artificial Sequence
  Sythetic
uuauugaaauuagcauuuucuuc

SEQ ID NO: 4272 - RNA, 24 nt, Artificial Sequence
  Sythetic
uuuauugaaauuagcauuuucuuc

SEQ ID NO: 4273 - RNA, 18 nt, Artificial Sequence
  Sythetic
ggaagcgugaugacaaag

SEQ ID NO: 4274 - RNA, 19 nt, Artificial Sequence
  Sythetic
gggaagcgugaugacaaag

SEQ ID NO: 4275 - RNA, 20 nt, Artificial Sequence
  Sythetic
agggaagcgugaugacaaag

SEQ ID NO: 4276 - RNA, 21 nt, Artificial Sequence
  Sythetic
aagggaagcgugaugacaaag

SEQ ID NO: 4277 - RNA, 22 nt, Artificial Sequence
  Sythetic
gaagggaagcgugaugacaaag

SEQ ID NO: 4278 - RNA, 23 nt, Artificial Sequence
  Sythetic
agaagggaagcgugaugacaaag

SEQ ID NO: 4279 - RNA, 24 nt, Artificial Sequence
  Sythetic
cagaagggaagcgugaugacaaag

SEQ ID NO: 4280 - RNA, 18 nt, Artificial Sequence
  Sythetic
acggcaucaacugcccag

SEQ ID NO: 4281 - RNA, 19 nt, Artificial Sequence
  Sythetic
cacggcaucaacugcccag

SEQ ID NO: 4282 - RNA, 20 nt, Artificial Sequence
  Sythetic
ccacggcaucaacugcccag

SEQ ID NO: 4283 - RNA, 21 nt, Artificial Sequence
  Sythetic
gccacggcaucaacugcccag

SEQ ID NO: 4284 - RNA, 22 nt, Artificial Sequence
  Sythetic
ugccacggcaucaacugcccag

SEQ ID NO: 4285 - RNA, 23 nt, Artificial Sequence
  Sythetic
uugccacggcaucaacugcccag

SEQ ID NO: 4286 - RNA, 24 nt, Artificial Sequence
  Sythetic
uuugccacggcaucaacugcccag

SEQ ID NO: 4287 - RNA, 18 nt, Artificial Sequence
  Sythetic
gucgggaauagucagcag

SEQ ID NO: 4288 - RNA, 19 nt, Artificial Sequence
  Sythetic
agucgggaauagucagcag

SEQ ID NO: 4289 - RNA, 20 nt, Artificial Sequence
  Sythetic
aagucgggaauagucagcag

SEQ ID NO: 4290 - RNA, 18 nt, Artificial Sequence
  Sythetic
gaagucgggaauagucag

SEQ ID NO: 4291 - RNA, 19 nt, Artificial Sequence
  Sythetic
ugaagucgggaauagucag

SEQ ID NO: 4292 - RNA, 20 nt, Artificial Sequence
  Sythetic
augaagucgggaauagucag

SEQ ID NO: 4293 - RNA, 18 nt, Artificial Sequence
  Sythetic
agacugaugaaggccagg

SEQ ID NO: 4294 - RNA, 19 nt, Artificial Sequence
  Sythetic
cagacugaugaaggccagg

SEQ ID NO: 4295 - RNA, 20 nt, Artificial Sequence
  Sythetic
ccagacugaugaaggccagg

SEQ ID NO: 4296 - RNA, 21 nt, Artificial Sequence
  Sythetic
uccagacugaugaaggccagg

SEQ ID NO: 4297 - RNA, 22 nt, Artificial Sequence
  Sythetic
guccagacugaugaaggccagg

SEQ ID NO: 4298 - RNA, 23 nt, Artificial Sequence
  Sythetic
gguccagacugaugaaggccagg

SEQ ID NO: 4299 - RNA, 24 nt, Artificial Sequence
  Sythetic
cgguccagacugaugaaggccagg

SEQ ID NO: 4300 - RNA, 18 nt, Artificial Sequence
  Sythetic
gaauagucagcaggaggg

SEQ ID NO: 4301 - RNA, 19 nt, Artificial Sequence
  Sythetic
ggaauagucagcaggaggg

SEQ ID NO: 4302 - RNA, 20 nt, Artificial Sequence
  Sythetic
gggaauagucagcaggaggg

SEQ ID NO: 4303 - RNA, 21 nt, Artificial Sequence
  Sythetic
cgggaauagucagcaggaggg

SEQ ID NO: 4304 - RNA, 22 nt, Artificial Sequence
  Sythetic
ucgggaauagucagcaggaggg

SEQ ID NO: 4305 - RNA, 23 nt, Artificial Sequence
  Sythetic
gucgggaauagucagcaggaggg

SEQ ID NO: 4306 - RNA, 24 nt, Artificial Sequence
  Sythetic
agucgggaauagucagcaggaggg

SEQ ID NO: 4307 - RNA, 18 nt, Artificial Sequence
  Sythetic
gauggaguagaugguggg

SEQ ID NO: 4308 - RNA, 19 nt, Artificial Sequence
  Sythetic
ugauggaguagaugguggg

SEQ ID NO: 4309 - RNA, 20 nt, Artificial Sequence
  Sythetic
augauggaguagaugguggg

SEQ ID NO: 4310 - RNA, 21 nt, Artificial Sequence
  Sythetic
gaugauggaguagaugguggg

SEQ ID NO: 4311 - RNA, 22 nt, Artificial Sequence
  Sythetic
agaugauggaguagaugguggg

SEQ ID NO: 4312 - RNA, 23 nt, Artificial Sequence
  Sythetic
aagaugauggaguagaugguggg

SEQ ID NO: 4313 - RNA, 24 nt, Artificial Sequence
  Sythetic
gaagaugauggaguagaugguggg

SEQ ID NO: 4314 - RNA, 18 nt, Artificial Sequence
  Sythetic
augccaguuaagaagaug

SEQ ID NO: 4315 - RNA, 19 nt, Artificial Sequence
  Sythetic
aaugccaguuaagaagaug

SEQ ID NO: 4316 - RNA, 20 nt, Artificial Sequence
  Sythetic
caaugccaguuaagaagaug

SEQ ID NO: 4317 - RNA, 21 nt, Artificial Sequence
  Sythetic
acaaugccaguuaagaagaug

SEQ ID NO: 4318 - RNA, 22 nt, Artificial Sequence
  Sythetic
cacaaugccaguuaagaagaug

SEQ ID NO: 4319 - RNA, 23 nt, Artificial Sequence
  Sythetic
ccacaaugccaguuaagaagaug

SEQ ID NO: 4320 - RNA, 24 nt, Artificial Sequence
  Sythetic
cccacaaugccaguuaagaagaug

SEQ ID NO: 4321 - RNA, 18 nt, Artificial Sequence
  Sythetic
aagaugauggaguagaug

SEQ ID NO: 4322 - RNA, 19 nt, Artificial Sequence
  Sythetic
gaagaugauggaguagaug

SEQ ID NO: 4323 - RNA, 20 nt, Artificial Sequence
  Sythetic
agaagaugauggaguagaug

SEQ ID NO: 4324 - RNA, 21 nt, Artificial Sequence
  Sythetic
aagaagaugauggaguagaug

SEQ ID NO: 4325 - RNA, 22 nt, Artificial Sequence
  Sythetic
uaagaagaugauggaguagaug

SEQ ID NO: 4326 - RNA, 23 nt, Artificial Sequence
  Sythetic
uuaagaagaugauggaguagaug

SEQ ID NO: 4327 - RNA, 24 nt, Artificial Sequence
  Sythetic
guuaagaagaugauggaguagaug

SEQ ID NO: 4328 - RNA, 18 nt, Artificial Sequence
  Sythetic
agguagcgguccagacug

SEQ ID NO: 4329 - RNA, 19 nt, Artificial Sequence
  Sythetic
cagguagcgguccagacug

SEQ ID NO: 4330 - RNA, 20 nt, Artificial Sequence
  Sythetic
ccagguagcgguccagacug

SEQ ID NO: 4331 - RNA, 21 nt, Artificial Sequence
  Sythetic
gccagguagcgguccagacug

SEQ ID NO: 4332 - RNA, 22 nt, Artificial Sequence
  Sythetic
ggccagguagcgguccagacug

SEQ ID NO: 4333 - RNA, 23 nt, Artificial Sequence
  Sythetic
uggccagguagcgguccagacug

SEQ ID NO: 4334 - RNA, 24 nt, Artificial Sequence
  Sythetic
auggccagguagcgguccagacug

SEQ ID NO: 4335 - RNA, 18 nt, Artificial Sequence
  Sythetic
aggaugaggacacugcug

SEQ ID NO: 4336 - RNA, 19 nt, Artificial Sequence
  Sythetic
caggaugaggacacugcug

SEQ ID NO: 4337 - RNA, 20 nt, Artificial Sequence
  Sythetic
ccaggaugaggacacugcug

SEQ ID NO: 4338 - RNA, 21 nt, Artificial Sequence
  Sythetic
gccaggaugaggacacugcug

SEQ ID NO: 4339 - RNA, 22 nt, Artificial Sequence
  Sythetic
ggccaggaugaggacacugcug

SEQ ID NO: 4340 - RNA, 23 nt, Artificial Sequence
  Sythetic
aggccaggaugaggacacugcug

SEQ ID NO: 4341 - RNA, 24 nt, Artificial Sequence
  Sythetic
aaggccaggaugaggacacugcug

SEQ ID NO: 4342 - RNA, 18 nt, Artificial Sequence
  Sythetic
acauggacugccuugcau

SEQ ID NO: 4343 - RNA, 19 nt, Artificial Sequence
  Sythetic
gacauggacugccuugcau

SEQ ID NO: 4344 - RNA, 20 nt, Artificial Sequence
  Sythetic
ugacauggacugccuugcau

SEQ ID NO: 4345 - RNA, 21 nt, Artificial Sequence
  Sythetic
augacauggacugccuugcau

SEQ ID NO: 4346 - RNA, 22 nt, Artificial Sequence
  Sythetic
gaugacauggacugccuugcau

SEQ ID NO: 4347 - RNA, 23 nt, Artificial Sequence
  Sythetic
agaugacauggacugccuugcau

SEQ ID NO: 4348 - RNA, 24 nt, Artificial Sequence
  Sythetic
uagaugacauggacugccuugcau

SEQ ID NO: 4349 - RNA, 18 nt, Artificial Sequence
  Sythetic
acugaugaaggccaggau

SEQ ID NO: 4350 - RNA, 19 nt, Artificial Sequence
  Sythetic
gacugaugaaggccaggau

SEQ ID NO: 4351 - RNA, 20 nt, Artificial Sequence
  Sythetic
agacugaugaaggccaggau

SEQ ID NO: 4352 - RNA, 21 nt, Artificial Sequence
  Sythetic
cagacugaugaaggccaggau

SEQ ID NO: 4353 - RNA, 22 nt, Artificial Sequence
  Sythetic
ccagacugaugaaggccaggau

SEQ ID NO: 4354 - RNA, 23 nt, Artificial Sequence
  Sythetic
uccagacugaugaaggccaggau

SEQ ID NO: 4355 - RNA, 24 nt, Artificial Sequence
  Sythetic
guccagacugaugaaggccaggau

SEQ ID NO: 4356 - RNA, 18 nt, Artificial Sequence
  Sythetic
uuuccucgguguaguuau

SEQ ID NO: 4357 - RNA, 19 nt, Artificial Sequence
  Sythetic
auuuccucgguguaguuau

SEQ ID NO: 4358 - RNA, 20 nt, Artificial Sequence
  Sythetic
cauuuccucgguguaguuau

SEQ ID NO: 4359 - RNA, 21 nt, Artificial Sequence
  Sythetic
ccauuuccucgguguaguuau

SEQ ID NO: 4360 - RNA, 22 nt, Artificial Sequence
  Sythetic
cccauuuccucgguguaguuau

SEQ ID NO: 4361 - RNA, 23 nt, Artificial Sequence
  Sythetic
gcccauuuccucgguguaguuau

SEQ ID NO: 4362 - RNA, 24 nt, Artificial Sequence
  Sythetic
agcccauuuccucgguguaguuau

SEQ ID NO: 4363 - RNA, 18 nt, Artificial Sequence
  Sythetic
uugcccacaaugccaguu

SEQ ID NO: 4364 - RNA, 19 nt, Artificial Sequence
  Sythetic
auugcccacaaugccaguu

SEQ ID NO: 4365 - RNA, 20 nt, Artificial Sequence
  Sythetic
cauugcccacaaugccaguu

SEQ ID NO: 4366 - RNA, 21 nt, Artificial Sequence
  Sythetic
ccauugcccacaaugccaguu

SEQ ID NO: 4367 - RNA, 22 nt, Artificial Sequence
  Sythetic
uccauugcccacaaugccaguu

SEQ ID NO: 4368 - RNA, 23 nt, Artificial Sequence
  Sythetic
auccauugcccacaaugccaguu

SEQ ID NO: 4369 - RNA, 24 nt, Artificial Sequence
  Sythetic
aauccauugcccacaaugccaguu

SEQ ID NO: 4370 - RNA, 18 nt, Artificial Sequence
  Sythetic
auggguuaccagaagaaa

SEQ ID NO: 4371 - RNA, 19 nt, Artificial Sequence
  Sythetic
cauggguuaccagaagaaa

SEQ ID NO: 4372 - RNA, 20 nt, Artificial Sequence
  Sythetic
ucauggguuaccagaagaaa

SEQ ID NO: 4373 - RNA, 21 nt, Artificial Sequence
  Sythetic
gucauggguuaccagaagaaa

SEQ ID NO: 4374 - RNA, 22 nt, Artificial Sequence
  Sythetic
ggucauggguuaccagaagaaa

SEQ ID NO: 4375 - RNA, 23 nt, Artificial Sequence
  Sythetic
uggucauggguuaccagaagaaa

SEQ ID NO: 4376 - RNA, 24 nt, Artificial Sequence
  Sythetic
cuggucauggguuaccagaagaaa

SEQ ID NO: 4377 - RNA, 18 nt, Artificial Sequence
  Sythetic
gauaacuacaccgaggaa

SEQ ID NO: 4378 - RNA, 19 nt, Artificial Sequence
  Sythetic
agauaacuacaccgaggaa

SEQ ID NO: 4379 - RNA, 20 nt, Artificial Sequence
  Sythetic
cagauaacuacaccgaggaa

SEQ ID NO: 4380 - RNA, 21 nt, Artificial Sequence
  Sythetic
ucagauaacuacaccgaggaa

SEQ ID NO: 4381 - RNA, 22 nt, Artificial Sequence
  Sythetic
uucagauaacuacaccgaggaa

SEQ ID NO: 4382 - RNA, 23 nt, Artificial Sequence
  Sythetic
cuucagauaacuacaccgaggaa

SEQ ID NO: 4383 - RNA, 24 nt, Artificial Sequence
  Sythetic
acuucagauaacuacaccgaggaa

SEQ ID NO: 4384 - RNA, 18 nt, Artificial Sequence
  Sythetic
ggguuaaugcuugcugaa

SEQ ID NO: 4385 - RNA, 19 nt, Artificial Sequence
  Sythetic
uggguuaaugcuugcugaa

SEQ ID NO: 4386 - RNA, 20 nt, Artificial Sequence
  Sythetic
cuggguuaaugcuugcugaa

SEQ ID NO: 4387 - RNA, 18 nt, Artificial Sequence
  Sythetic
acacuucagauaacuaca

SEQ ID NO: 4388 - RNA, 19 nt, Artificial Sequence
  Sythetic
uacacuucagauaacuaca

SEQ ID NO: 4389 - RNA, 20 nt, Artificial Sequence
  Sythetic
auacacuucagauaacuaca

SEQ ID NO: 4390 - RNA, 21 nt, Artificial Sequence
  Sythetic
uauacacuucagauaacuaca

SEQ ID NO: 4391 - RNA, 22 nt, Artificial Sequence
  Sythetic
auauacacuucagauaacuaca

SEQ ID NO: 4392 - RNA, 23 nt, Artificial Sequence
  Sythetic
gauauacacuucagauaacuaca

SEQ ID NO: 4393 - RNA, 24 nt, Artificial Sequence
  Sythetic
agauauacacuucagauaacuaca

SEQ ID NO: 4394 - RNA, 18 nt, Artificial Sequence
  Sythetic
gagaaccagcgguuacca

SEQ ID NO: 4395 - RNA, 19 nt, Artificial Sequence
  Sythetic
ggagaaccagcgguuacca

SEQ ID NO: 4396 - RNA, 20 nt, Artificial Sequence
  Sythetic
uggagaaccagcgguuacca

SEQ ID NO: 4397 - RNA, 21 nt, Artificial Sequence
  Sythetic
cuggagaaccagcgguuacca

SEQ ID NO: 4398 - RNA, 22 nt, Artificial Sequence
  Sythetic
ucuggagaaccagcgguuacca

SEQ ID NO: 4399 - RNA, 23 nt, Artificial Sequence
  Sythetic
aucuggagaaccagcgguuacca

SEQ ID NO: 4400 - RNA, 24 nt, Artificial Sequence
  Sythetic
caucuggagaaccagcgguuacca

SEQ ID NO: 4401 - RNA, 18 nt, Artificial Sequence
  Sythetic
accaacagucagaggcca

SEQ ID NO: 4402 - RNA, 19 nt, Artificial Sequence
  Sythetic
caccaacagucagaggcca

SEQ ID NO: 4403 - RNA, 20 nt, Artificial Sequence
  Sythetic
ccaccaacagucagaggcca

SEQ ID NO: 4404 - RNA, 21 nt, Artificial Sequence
  Sythetic
gccaccaacagucagaggcca

SEQ ID NO: 4405 - RNA, 22 nt, Artificial Sequence
  Sythetic
cgccaccaacagucagaggcca

SEQ ID NO: 4406 - RNA, 23 nt, Artificial Sequence
  Sythetic
acgccaccaacagucagaggcca

SEQ ID NO: 4407 - RNA, 24 nt, Artificial Sequence
  Sythetic
cacgccaccaacagucagaggcca

SEQ ID NO: 4408 - RNA, 18 nt, Artificial Sequence
  Sythetic
accgaggaaaugggcuca

SEQ ID NO: 4409 - RNA, 19 nt, Artificial Sequence
  Sythetic
caccgaggaaaugggcuca

SEQ ID NO: 4410 - RNA, 20 nt, Artificial Sequence
  Sythetic
acaccgaggaaaugggcuca

SEQ ID NO: 4411 - RNA, 21 nt, Artificial Sequence
  Sythetic
uacaccgaggaaaugggcuca

SEQ ID NO: 4412 - RNA, 22 nt, Artificial Sequence
  Sythetic
cuacaccgaggaaaugggcuca

SEQ ID NO: 4413 - RNA, 23 nt, Artificial Sequence
  Sythetic
acuacaccgaggaaaugggcuca

SEQ ID NO: 4414 - RNA, 24 nt, Artificial Sequence
  Sythetic
aacuacaccgaggaaaugggcuca

SEQ ID NO: 4415 - RNA, 18 nt, Artificial Sequence
  Sythetic
gggacuaugacuccauga

SEQ ID NO: 4416 - RNA, 19 nt, Artificial Sequence
  Sythetic
ggggacuaugacuccauga

SEQ ID NO: 4417 - RNA, 20 nt, Artificial Sequence
  Sythetic
aggggacuaugacuccauga

SEQ ID NO: 4418 - RNA, 21 nt, Artificial Sequence
  Sythetic
caggggacuaugacuccauga

SEQ ID NO: 4419 - RNA, 22 nt, Artificial Sequence
  Sythetic
ucaggggacuaugacuccauga

SEQ ID NO: 4420 - RNA, 23 nt, Artificial Sequence
  Sythetic
cucaggggacuaugacuccauga

SEQ ID NO: 4421 - RNA, 24 nt, Artificial Sequence
  Sythetic
gcucaggggacuaugacuccauga

SEQ ID NO: 4422 - RNA, 18 nt, Artificial Sequence
  Sythetic
auccuggucauggguuac

SEQ ID NO: 4423 - RNA, 19 nt, Artificial Sequence
  Sythetic
cauccuggucauggguuac

SEQ ID NO: 4424 - RNA, 20 nt, Artificial Sequence
  Sythetic
ucauccuggucauggguuac

SEQ ID NO: 4425 - RNA, 21 nt, Artificial Sequence
  Sythetic
gucauccuggucauggguuac

SEQ ID NO: 4426 - RNA, 22 nt, Artificial Sequence
  Sythetic
ggucauccuggucauggguuac

SEQ ID NO: 4427 - RNA, 23 nt, Artificial Sequence
  Sythetic
uggucauccuggucauggguuac

SEQ ID NO: 4428 - RNA, 24 nt, Artificial Sequence
  Sythetic
uuggucauccuggucauggguuac

SEQ ID NO: 4429 - RNA, 18 nt, Artificial Sequence
  Sythetic
acuucagauaacuacacc

SEQ ID NO: 4430 - RNA, 19 nt, Artificial Sequence
  Sythetic
cacuucagauaacuacacc

SEQ ID NO: 4431 - RNA, 20 nt, Artificial Sequence
  Sythetic
acacuucagauaacuacacc

SEQ ID NO: 4432 - RNA, 21 nt, Artificial Sequence
  Sythetic
uacacuucagauaacuacacc

SEQ ID NO: 4433 - RNA, 22 nt, Artificial Sequence
  Sythetic
auacacuucagauaacuacacc

SEQ ID NO: 4434 - RNA, 23 nt, Artificial Sequence
  Sythetic
uauacacuucagauaacuacacc

SEQ ID NO: 4435 - RNA, 24 nt, Artificial Sequence
  Sythetic
auauacacuucagauaacuacacc

SEQ ID NO: 4436 - RNA, 18 nt, Artificial Sequence
  Sythetic
ggagaaccagcgguuacc

SEQ ID NO: 4437 - RNA, 19 nt, Artificial Sequence
  Sythetic
uggagaaccagcgguuacc

SEQ ID NO: 4438 - RNA, 20 nt, Artificial Sequence
  Sythetic
cuggagaaccagcgguuacc

SEQ ID NO: 4439 - RNA, 21 nt, Artificial Sequence
  Sythetic
ucuggagaaccagcgguuacc

SEQ ID NO: 4440 - RNA, 22 nt, Artificial Sequence
  Sythetic
aucuggagaaccagcgguuacc

SEQ ID NO: 4441 - RNA, 23 nt, Artificial Sequence
  Sythetic
caucuggagaaccagcgguuacc

SEQ ID NO: 4442 - RNA, 24 nt, Artificial Sequence
  Sythetic
gcaucuggagaaccagcgguuacc

SEQ ID NO: 4443 - RNA, 18 nt, Artificial Sequence
  Sythetic
caccaacagucagaggcc

SEQ ID NO: 4444 - RNA, 19 nt, Artificial Sequence
  Sythetic
ccaccaacagucagaggcc

SEQ ID NO: 4445 - RNA, 20 nt, Artificial Sequence
  Sythetic
gccaccaacagucagaggcc

SEQ ID NO: 4446 - RNA, 21 nt, Artificial Sequence
  Sythetic
cgccaccaacagucagaggcc

SEQ ID NO: 4447 - RNA, 22 nt, Artificial Sequence
  Sythetic
acgccaccaacagucagaggcc

SEQ ID NO: 4448 - RNA, 23 nt, Artificial Sequence
  Sythetic
cacgccaccaacagucagaggcc

SEQ ID NO: 4449 - RNA, 24 nt, Artificial Sequence
  Sythetic
ccacgccaccaacagucagaggcc

SEQ ID NO: 4450 - RNA, 18 nt, Artificial Sequence
  Sythetic
ucaggggacuaugacucc

SEQ ID NO: 4451 - RNA, 19 nt, Artificial Sequence
  Sythetic
cucaggggacuaugacucc

SEQ ID NO: 4452 - RNA, 20 nt, Artificial Sequence
  Sythetic
gcucaggggacuaugacucc

SEQ ID NO: 4453 - RNA, 21 nt, Artificial Sequence
  Sythetic
ggcucaggggacuaugacucc

SEQ ID NO: 4454 - RNA, 22 nt, Artificial Sequence
  Sythetic
gggcucaggggacuaugacucc

SEQ ID NO: 4455 - RNA, 23 nt, Artificial Sequence
  Sythetic
ugggcucaggggacuaugacucc

SEQ ID NO: 4456 - RNA, 24 nt, Artificial Sequence
  Sythetic
augggcucaggggacuaugacucc

SEQ ID NO: 4457 - RNA, 18 nt, Artificial Sequence
  Sythetic
ugaaggaacccuguuucc

SEQ ID NO: 4458 - RNA, 19 nt, Artificial Sequence
  Sythetic
augaaggaacccuguuucc

SEQ ID NO: 4459 - RNA, 20 nt, Artificial Sequence
  Sythetic
caugaaggaacccuguuucc

SEQ ID NO: 4460 - RNA, 21 nt, Artificial Sequence
  Sythetic
ccaugaaggaacccuguuucc

SEQ ID NO: 4461 - RNA, 22 nt, Artificial Sequence
  Sythetic
uccaugaaggaacccuguuucc

SEQ ID NO: 4462 - RNA, 23 nt, Artificial Sequence
  Sythetic
cuccaugaaggaacccuguuucc

SEQ ID NO: 4463 - RNA, 24 nt, Artificial Sequence
  Sythetic
acuccaugaaggaacccuguuucc

SEQ ID NO: 4464 - RNA, 18 nt, Artificial Sequence
  Sythetic
caccgaggaaaugggcuc

SEQ ID NO: 4465 - RNA, 19 nt, Artificial Sequence
  Sythetic
acaccgaggaaaugggcuc

SEQ ID NO: 4466 - RNA, 20 nt, Artificial Sequence
  Sythetic
uacaccgaggaaaugggcuc

SEQ ID NO: 4467 - RNA, 21 nt, Artificial Sequence
  Sythetic
cuacaccgaggaaaugggcuc

SEQ ID NO: 4468 - RNA, 22 nt, Artificial Sequence
  Sythetic
acuacaccgaggaaaugggcuc

SEQ ID NO: 4469 - RNA, 23 nt, Artificial Sequence
  Sythetic
aacuacaccgaggaaaugggcuc

SEQ ID NO: 4470 - RNA, 24 nt, Artificial Sequence
  Sythetic
uaacuacaccgaggaaaugggcuc

SEQ ID NO: 4471 - RNA, 18 nt, Artificial Sequence
  Sythetic
cuggucauggguuaccag

SEQ ID NO: 4472 - RNA, 19 nt, Artificial Sequence
  Sythetic
ccuggucauggguuaccag

SEQ ID NO: 4473 - RNA, 20 nt, Artificial Sequence
  Sythetic
uccuggucauggguuaccag

SEQ ID NO: 4474 - RNA, 21 nt, Artificial Sequence
  Sythetic
auccuggucauggguuaccag

SEQ ID NO: 4475 - RNA, 22 nt, Artificial Sequence
  Sythetic
cauccuggucauggguuaccag

SEQ ID NO: 4476 - RNA, 23 nt, Artificial Sequence
  Sythetic
ucauccuggucauggguuaccag

SEQ ID NO: 4477 - RNA, 24 nt, Artificial Sequence
  Sythetic
gucauccuggucauggguuaccag

SEQ ID NO: 4478 - RNA, 18 nt, Artificial Sequence
  Sythetic
cuucagauaacuacaccg

SEQ ID NO: 4479 - RNA, 19 nt, Artificial Sequence
  Sythetic
acuucagauaacuacaccg

SEQ ID NO: 4480 - RNA, 20 nt, Artificial Sequence
  Sythetic
cacuucagauaacuacaccg

SEQ ID NO: 4481 - RNA, 21 nt, Artificial Sequence
  Sythetic
acacuucagauaacuacaccg

SEQ ID NO: 4482 - RNA, 22 nt, Artificial Sequence
  Sythetic
uacacuucagauaacuacaccg

SEQ ID NO: 4483 - RNA, 23 nt, Artificial Sequence
  Sythetic
auacacuucagauaacuacaccg

SEQ ID NO: 4484 - RNA, 24 nt, Artificial Sequence
  Sythetic
uauacacuucagauaacuacaccg

SEQ ID NO: 4485 - RNA, 18 nt, Artificial Sequence
  Sythetic
aaccagcgguuaccaugg

SEQ ID NO: 4486 - RNA, 19 nt, Artificial Sequence
  Sythetic
gaaccagcgguuaccaugg

SEQ ID NO: 4487 - RNA, 20 nt, Artificial Sequence
  Sythetic
agaaccagcgguuaccaugg

SEQ ID NO: 4488 - RNA, 21 nt, Artificial Sequence
  Sythetic
gagaaccagcgguuaccaugg

SEQ ID NO: 4489 - RNA, 22 nt, Artificial Sequence
  Sythetic
ggagaaccagcgguuaccaugg

SEQ ID NO: 4490 - RNA, 23 nt, Artificial Sequence
  Sythetic
uggagaaccagcgguuaccaugg

SEQ ID NO: 4491 - RNA, 24 nt, Artificial Sequence
  Sythetic
cuggagaaccagcgguuaccaugg

SEQ ID NO: 4492 - RNA, 18 nt, Artificial Sequence
  Sythetic
ggccaaggaagcuguugg

SEQ ID NO: 4493 - RNA, 19 nt, Artificial Sequence
  Sythetic
aggccaaggaagcuguugg

SEQ ID NO: 4494 - RNA, 20 nt, Artificial Sequence
  Sythetic
gaggccaaggaagcuguugg

SEQ ID NO: 4495 - RNA, 21 nt, Artificial Sequence
  Sythetic
agaggccaaggaagcuguugg

SEQ ID NO: 4496 - RNA, 22 nt, Artificial Sequence
  Sythetic
cagaggccaaggaagcuguugg

SEQ ID NO: 4497 - RNA, 23 nt, Artificial Sequence
  Sythetic
ucagaggccaaggaagcuguugg

SEQ ID NO: 4498 - RNA, 24 nt, Artificial Sequence
  Sythetic
gucagaggccaaggaagcuguugg

SEQ ID NO: 4499 - RNA, 18 nt, Artificial Sequence
  Sythetic
gaaccagcgguuaccaug

SEQ ID NO: 4500 - RNA, 19 nt, Artificial Sequence
  Sythetic
agaaccagcgguuaccaug

SEQ ID NO: 4501 - RNA, 20 nt, Artificial Sequence
  Sythetic
gagaaccagcgguuaccaug

SEQ ID NO: 4502 - RNA, 21 nt, Artificial Sequence
  Sythetic
ggagaaccagcgguuaccaug

SEQ ID NO: 4503 - RNA, 22 nt, Artificial Sequence
  Sythetic
uggagaaccagcgguuaccaug

SEQ ID NO: 4504 - RNA, 23 nt, Artificial Sequence
  Sythetic
cuggagaaccagcgguuaccaug

SEQ ID NO: 4505 - RNA, 24 nt, Artificial Sequence
  Sythetic
ucuggagaaccagcgguuaccaug

SEQ ID NO: 4506 - RNA, 18 nt, Artificial Sequence
  Sythetic
ggggacuaugacuccaug

SEQ ID NO: 4507 - RNA, 19 nt, Artificial Sequence
  Sythetic
aggggacuaugacuccaug

SEQ ID NO: 4508 - RNA, 20 nt, Artificial Sequence
  Sythetic
caggggacuaugacuccaug

SEQ ID NO: 4509 - RNA, 21 nt, Artificial Sequence
  Sythetic
ucaggggacuaugacuccaug

SEQ ID NO: 4510 - RNA, 22 nt, Artificial Sequence
  Sythetic
cucaggggacuaugacuccaug

SEQ ID NO: 4511 - RNA, 23 nt, Artificial Sequence
  Sythetic
gcucaggggacuaugacuccaug

SEQ ID NO: 4512 - RNA, 24 nt, Artificial Sequence
  Sythetic
ggcucaggggacuaugacuccaug

SEQ ID NO: 4513 - RNA, 18 nt, Artificial Sequence
  Sythetic
aagaaacugagaagcaug

SEQ ID NO: 4514 - RNA, 19 nt, Artificial Sequence
  Sythetic
gaagaaacugagaagcaug

SEQ ID NO: 4515 - RNA, 20 nt, Artificial Sequence
  Sythetic
agaagaaacugagaagcaug

SEQ ID NO: 4516 - RNA, 21 nt, Artificial Sequence
  Sythetic
cagaagaaacugagaagcaug

SEQ ID NO: 4517 - RNA, 22 nt, Artificial Sequence
  Sythetic
ccagaagaaacugagaagcaug

SEQ ID NO: 4518 - RNA, 23 nt, Artificial Sequence
  Sythetic
accagaagaaacugagaagcaug

SEQ ID NO: 4519 - RNA, 24 nt, Artificial Sequence
  Sythetic
uaccagaagaaacugagaagcaug

SEQ ID NO: 4520 - RNA, 18 nt, Artificial Sequence
  Sythetic
aggaacccuguuuccgug

SEQ ID NO: 4521 - RNA, 19 nt, Artificial Sequence
  Sythetic
aaggaacccuguuuccgug

SEQ ID NO: 4522 - RNA, 20 nt, Artificial Sequence
  Sythetic
gaaggaacccuguuuccgug

SEQ ID NO: 4523 - RNA, 21 nt, Artificial Sequence
  Sythetic
ugaaggaacccuguuuccgug

SEQ ID NO: 4524 - RNA, 22 nt, Artificial Sequence
  Sythetic
augaaggaacccuguuuccgug

SEQ ID NO: 4525 - RNA, 23 nt, Artificial Sequence
  Sythetic
caugaaggaacccuguuuccgug

SEQ ID NO: 4526 - RNA, 24 nt, Artificial Sequence
  Sythetic
ccaugaaggaacccuguuuccgug

SEQ ID NO: 4527 - RNA, 18 nt, Artificial Sequence
  Sythetic
gguuaaugcuugcugaau

SEQ ID NO: 4528 - RNA, 19 nt, Artificial Sequence
  Sythetic
ggguuaaugcuugcugaau

SEQ ID NO: 4529 - RNA, 20 nt, Artificial Sequence
  Sythetic
uggguuaaugcuugcugaau

SEQ ID NO: 4530 - RNA, 18 nt, Artificial Sequence
  Sythetic
ggguuaccagaagaaacu

SEQ ID NO: 4531 - RNA, 19 nt, Artificial Sequence
  Sythetic
uggguuaccagaagaaacu

SEQ ID NO: 4532 - RNA, 20 nt, Artificial Sequence
  Sythetic
auggguuaccagaagaaacu

SEQ ID NO: 4533 - RNA, 21 nt, Artificial Sequence
  Sythetic
cauggguuaccagaagaaacu

SEQ ID NO: 4534 - RNA, 22 nt, Artificial Sequence
  Sythetic
ucauggguuaccagaagaaacu

SEQ ID NO: 4535 - RNA, 23 nt, Artificial Sequence
  Sythetic
gucauggguuaccagaagaaacu

SEQ ID NO: 4536 - RNA, 24 nt, Artificial Sequence
  Sythetic
ggucauggguuaccagaagaaacu

SEQ ID NO: 4537 - RNA, 18 nt, Artificial Sequence
  Sythetic
ccguggcaaacugguacu

SEQ ID NO: 4538 - RNA, 19 nt, Artificial Sequence
  Sythetic
gccguggcaaacugguacu

SEQ ID NO: 4539 - RNA, 20 nt, Artificial Sequence
  Sythetic
ugccguggcaaacugguacu

SEQ ID NO: 4540 - RNA, 21 nt, Artificial Sequence
  Sythetic
augccguggcaaacugguacu

SEQ ID NO: 4541 - RNA, 22 nt, Artificial Sequence
  Sythetic
gaugccguggcaaacugguacu

SEQ ID NO: 4542 - RNA, 23 nt, Artificial Sequence
  Sythetic
ugaugccguggcaaacugguacu

SEQ ID NO: 4543 - RNA, 24 nt, Artificial Sequence
  Sythetic
uugaugccguggcaaacugguacu

SEQ ID NO: 4544 - RNA, 18 nt, Artificial Sequence
  Sythetic
acaccgaggaaaugggcu

SEQ ID NO: 4545 - RNA, 19 nt, Artificial Sequence
  Sythetic
uacaccgaggaaaugggcu

SEQ ID NO: 4546 - RNA, 20 nt, Artificial Sequence
  Sythetic
cuacaccgaggaaaugggcu

SEQ ID NO: 4547 - RNA, 21 nt, Artificial Sequence
  Sythetic
acuacaccgaggaaaugggcu

SEQ ID NO: 4548 - RNA, 22 nt, Artificial Sequence
  Sythetic
aacuacaccgaggaaaugggcu

SEQ ID NO: 4549 - RNA, 23 nt, Artificial Sequence
  Sythetic
uaacuacaccgaggaaaugggcu

SEQ ID NO: 4550 - RNA, 24 nt, Artificial Sequence
  Sythetic
auaacuacaccgaggaaaugggcu

SEQ ID NO: 4551 - RNA, 18 nt, Artificial Sequence
  Sythetic
guccacgccaccaacagu

SEQ ID NO: 4552 - RNA, 19 nt, Artificial Sequence
  Sythetic
cguccacgccaccaacagu

SEQ ID NO: 4553 - RNA, 20 nt, Artificial Sequence
  Sythetic
ucguccacgccaccaacagu

SEQ ID NO: 4554 - RNA, 21 nt, Artificial Sequence
  Sythetic
aucguccacgccaccaacagu

SEQ ID NO: 4555 - RNA, 22 nt, Artificial Sequence
  Sythetic
caucguccacgccaccaacagu

SEQ ID NO: 4556 - RNA, 23 nt, Artificial Sequence
  Sythetic
ccaucguccacgccaccaacagu

SEQ ID NO: 4557 - RNA, 24 nt, Artificial Sequence
  Sythetic
gccaucguccacgccaccaacagu

SEQ ID NO: 4558 - RNA, 18 nt, Artificial Sequence
  Sythetic
auccuggccuucaucagu

SEQ ID NO: 4559 - RNA, 19 nt, Artificial Sequence
  Sythetic
cauccuggccuucaucagu

SEQ ID NO: 4560 - RNA, 20 nt, Artificial Sequence
  Sythetic
ucauccuggccuucaucagu

SEQ ID NO: 4561 - RNA, 21 nt, Artificial Sequence
  Sythetic
cucauccuggccuucaucagu

SEQ ID NO: 4562 - RNA, 22 nt, Artificial Sequence
  Sythetic
ccucauccuggccuucaucagu

SEQ ID NO: 4563 - RNA, 23 nt, Artificial Sequence
  Sythetic
uccucauccuggccuucaucagu

SEQ ID NO: 4564 - RNA, 24 nt, Artificial Sequence
  Sythetic
guccucauccuggccuucaucagu

SEQ ID NO: 4565 - RNA, 18 nt, Artificial Sequence
  Sythetic
aucuucuuaacuggcauu

SEQ ID NO: 4566 - RNA, 19 nt, Artificial Sequence
  Sythetic
caucuucuuaacuggcauu

SEQ ID NO: 4567 - RNA, 20 nt, Artificial Sequence
  Sythetic
ucaucuucuuaacuggcauu

SEQ ID NO: 4568 - RNA, 21 nt, Artificial Sequence
  Sythetic
aucaucuucuuaacuggcauu

SEQ ID NO: 4569 - RNA, 22 nt, Artificial Sequence
  Sythetic
caucaucuucuuaacuggcauu

SEQ ID NO: 4570 - RNA, 23 nt, Artificial Sequence
  Sythetic
ccaucaucuucuuaacuggcauu

SEQ ID NO: 4571 - RNA, 24 nt, Artificial Sequence
  Sythetic
uccaucaucuucuuaacuggcauu

SEQ ID NO: 4572 - RNA, 18 nt, Artificial Sequence
  Sythetic
cguggcaaacugguacuu

SEQ ID NO: 4573 - RNA, 19 nt, Artificial Sequence
  Sythetic
ccguggcaaacugguacuu

SEQ ID NO: 4574 - RNA, 20 nt, Artificial Sequence
  Sythetic
gccguggcaaacugguacuu

SEQ ID NO: 4575 - RNA, 21 nt, Artificial Sequence
  Sythetic
ugccguggcaaacugguacuu

SEQ ID NO: 4576 - RNA, 22 nt, Artificial Sequence
  Sythetic
augccguggcaaacugguacuu

SEQ ID NO: 4577 - RNA, 23 nt, Artificial Sequence
  Sythetic
gaugccguggcaaacugguacuu

SEQ ID NO: 4578 - RNA, 24 nt, Artificial Sequence
  Sythetic
ugaugccguggcaaacugguacuu

SEQ ID NO: 4579 - RNA, 18 nt, Artificial Sequence
  Sythetic
ugucaucacgcuucccuu

SEQ ID NO: 4580 - RNA, 19 nt, Artificial Sequence
  Sythetic
uugucaucacgcuucccuu

SEQ ID NO: 4581 - RNA, 20 nt, Artificial Sequence
  Sythetic
uuugucaucacgcuucccuu

SEQ ID NO: 4582 - RNA, 21 nt, Artificial Sequence
  Sythetic
cuuugucaucacgcuucccuu

SEQ ID NO: 4583 - RNA, 22 nt, Artificial Sequence
  Sythetic
ucuuugucaucacgcuucccuu

SEQ ID NO: 4584 - RNA, 23 nt, Artificial Sequence
  Sythetic
cucuuugucaucacgcuucccuu

SEQ ID NO: 4585 - RNA, 24 nt, Artificial Sequence
  Sythetic
ccucuuugucaucacgcuucccuu

SEQ ID NO: 4586 - RNA, 18 nt, Artificial Sequence
  Sythetic
guggcaaacugguacuuu

SEQ ID NO: 4587 - RNA, 19 nt, Artificial Sequence
  Sythetic
cguggcaaacugguacuuu

SEQ ID NO: 4588 - RNA, 20 nt, Artificial Sequence
  Sythetic
ccguggcaaacugguacuuu

SEQ ID NO: 4589 - RNA, 21 nt, Artificial Sequence
  Sythetic
gccguggcaaacugguacuuu

SEQ ID NO: 4590 - RNA, 22 nt, Artificial Sequence
  Sythetic
ugccguggcaaacugguacuuu

SEQ ID NO: 4591 - RNA, 23 nt, Artificial Sequence
  Sythetic
augccguggcaaacugguacuuu

SEQ ID NO: 4592 - RNA, 24 nt, Artificial Sequence
  Sythetic
gaugccguggcaaacugguacuuu

SEQ ID NO: 4593 - RNA, 18 nt, Artificial Sequence
  Sythetic
gauaaugcaauagcagga

SEQ ID NO: 4594 - RNA, 19 nt, Artificial Sequence
  Sythetic
ugauaaugcaauagcagga

SEQ ID NO: 4595 - RNA, 20 nt, Artificial Sequence
  Sythetic
augauaaugcaauagcagga

SEQ ID NO: 4596 - RNA, 21 nt, Artificial Sequence
  Sythetic
gaugauaaugcaauagcagga

SEQ ID NO: 4597 - RNA, 22 nt, Artificial Sequence
  Sythetic
agaugauaaugcaauagcagga

SEQ ID NO: 4598 - RNA, 23 nt, Artificial Sequence
  Sythetic
gagaugauaaugcaauagcagga

SEQ ID NO: 4599 - RNA, 24 nt, Artificial Sequence
  Sythetic
ggagaugauaaugcaauagcagga

SEQ ID NO: 4600 - RNA, 18 nt, Artificial Sequence
  Sythetic
caaggaaagcauagagga

SEQ ID NO: 4601 - RNA, 19 nt, Artificial Sequence
  Sythetic
ccaaggaaagcauagagga

SEQ ID NO: 4602 - RNA, 20 nt, Artificial Sequence
  Sythetic
uccaaggaaagcauagagga

SEQ ID NO: 4603 - RNA, 21 nt, Artificial Sequence
  Sythetic
cuccaaggaaagcauagagga

SEQ ID NO: 4604 - RNA, 22 nt, Artificial Sequence
  Sythetic
gcuccaaggaaagcauagagga

SEQ ID NO: 4605 - RNA, 23 nt, Artificial Sequence
  Sythetic
ggcuccaaggaaagcauagagga

SEQ ID NO: 4606 - RNA, 24 nt, Artificial Sequence
  Sythetic
uggcuccaaggaaagcauagagga

SEQ ID NO: 4607 - RNA, 18 nt, Artificial Sequence
  Sythetic
accucgcuuuccuuugga

SEQ ID NO: 4608 - RNA, 19 nt, Artificial Sequence
  Sythetic
caccucgcuuuccuuugga

SEQ ID NO: 4609 - RNA, 20 nt, Artificial Sequence
  Sythetic
ccaccucgcuuuccuuugga

SEQ ID NO: 4610 - RNA, 21 nt, Artificial Sequence
  Sythetic
uccaccucgcuuuccuuugga

SEQ ID NO: 4611 - RNA, 22 nt, Artificial Sequence
  Sythetic
guccaccucgcuuuccuuugga

SEQ ID NO: 4612 - RNA, 23 nt, Artificial Sequence
  Sythetic
uguccaccucgcuuuccuuugga

SEQ ID NO: 4613 - RNA, 24 nt, Artificial Sequence
  Sythetic
auguccaccucgcuuuccuuugga

SEQ ID NO: 4614 - RNA, 18 nt, Artificial Sequence
  Sythetic
ugauuuccaggaggauga

SEQ ID NO: 4615 - RNA, 19 nt, Artificial Sequence
  Sythetic
augauuuccaggaggauga

SEQ ID NO: 4616 - RNA, 20 nt, Artificial Sequence
  Sythetic
gaugauuuccaggaggauga

SEQ ID NO: 4617 - RNA, 21 nt, Artificial Sequence
  Sythetic
ugaugauuuccaggaggauga

SEQ ID NO: 4618 - RNA, 22 nt, Artificial Sequence
  Sythetic
uugaugauuuccaggaggauga

SEQ ID NO: 4619 - RNA, 23 nt, Artificial Sequence
  Sythetic
cuugaugauuuccaggaggauga

SEQ ID NO: 4620 - RNA, 24 nt, Artificial Sequence
  Sythetic
gcuugaugauuuccaggaggauga

SEQ ID NO: 4621 - RNA, 18 nt, Artificial Sequence
  Sythetic
ggcuccaaggaaagcaua

SEQ ID NO: 4622 - RNA, 19 nt, Artificial Sequence
  Sythetic
uggcuccaaggaaagcaua

SEQ ID NO: 4623 - RNA, 20 nt, Artificial Sequence
  Sythetic
uuggcuccaaggaaagcaua

SEQ ID NO: 4624 - RNA, 21 nt, Artificial Sequence
  Sythetic
uuuggcuccaaggaaagcaua

SEQ ID NO: 4625 - RNA, 22 nt, Artificial Sequence
  Sythetic
auuuggcuccaaggaaagcaua

SEQ ID NO: 4626 - RNA, 23 nt, Artificial Sequence
  Sythetic
aauuuggcuccaaggaaagcaua

SEQ ID NO: 4627 - RNA, 24 nt, Artificial Sequence
  Sythetic
aaauuuggcuccaaggaaagcaua

SEQ ID NO: 4628 - RNA, 18 nt, Artificial Sequence
  Sythetic
ccaacaggcgaagaaagc

SEQ ID NO: 4629 - RNA, 19 nt, Artificial Sequence
  Sythetic
gccaacaggcgaagaaagc

SEQ ID NO: 4630 - RNA, 20 nt, Artificial Sequence
  Sythetic
agccaacaggcgaagaaagc

SEQ ID NO: 4631 - RNA, 21 nt, Artificial Sequence
  Sythetic
cagccaacaggcgaagaaagc

SEQ ID NO: 4632 - RNA, 22 nt, Artificial Sequence
  Sythetic
gcagccaacaggcgaagaaagc

SEQ ID NO: 4633 - RNA, 23 nt, Artificial Sequence
  Sythetic
ggcagccaacaggcgaagaaagc

SEQ ID NO: 4634 - RNA, 24 nt, Artificial Sequence
  Sythetic
aggcagccaacaggcgaagaaagc

SEQ ID NO: 4635 - RNA, 18 nt, Artificial Sequence
  Sythetic
uuuuacaucuguguuagc

SEQ ID NO: 4636 - RNA, 19 nt, Artificial Sequence
  Sythetic
cuuuuacaucuguguuagc

SEQ ID NO: 4637 - RNA, 20 nt, Artificial Sequence
  Sythetic
ucuuuuacaucuguguuagc

SEQ ID NO: 4638 - RNA, 21 nt, Artificial Sequence
  Sythetic
gucuuuuacaucuguguuagc

SEQ ID NO: 4639 - RNA, 22 nt, Artificial Sequence
  Sythetic
agucuuuuacaucuguguuagc

SEQ ID NO: 4640 - RNA, 23 nt, Artificial Sequence
  Sythetic
aagucuuuuacaucuguguuagc

SEQ ID NO: 4641 - RNA, 24 nt, Artificial Sequence
  Sythetic
aaagucuuuuacaucuguguuagc

SEQ ID NO: 4642 - RNA, 18 nt, Artificial Sequence
  Sythetic
guuggcaaagaugaaguc

SEQ ID NO: 4643 - RNA, 19 nt, Artificial Sequence
  Sythetic
cguuggcaaagaugaaguc

SEQ ID NO: 4644 - RNA, 20 nt, Artificial Sequence
  Sythetic
acguuggcaaagaugaaguc

SEQ ID NO: 4645 - RNA, 21 nt, Artificial Sequence
  Sythetic
gacguuggcaaagaugaaguc

SEQ ID NO: 4646 - RNA, 22 nt, Artificial Sequence
  Sythetic
ugacguuggcaaagaugaaguc

SEQ ID NO: 4647 - RNA, 23 nt, Artificial Sequence
  Sythetic
cugacguuggcaaagaugaaguc

SEQ ID NO: 4648 - RNA, 24 nt, Artificial Sequence
  Sythetic
acugacguuggcaaagaugaaguc

SEQ ID NO: 4649 - RNA, 18 nt, Artificial Sequence
  Sythetic
cagacucaguggaaacag

SEQ ID NO: 4650 - RNA, 19 nt, Artificial Sequence
  Sythetic
ucagacucaguggaaacag

SEQ ID NO: 4651 - RNA, 20 nt, Artificial Sequence
  Sythetic
cucagacucaguggaaacag

SEQ ID NO: 4652 - RNA, 21 nt, Artificial Sequence
  Sythetic
acucagacucaguggaaacag

SEQ ID NO: 4653 - RNA, 22 nt, Artificial Sequence
  Sythetic
gacucagacucaguggaaacag

SEQ ID NO: 4654 - RNA, 23 nt, Artificial Sequence
  Sythetic
agacucagacucaguggaaacag

SEQ ID NO: 4655 - RNA, 24 nt, Artificial Sequence
  Sythetic
aagacucagacucaguggaaacag

SEQ ID NO: 4656 - RNA, 18 nt, Artificial Sequence
  Sythetic
uugcuugaugauuuccag

SEQ ID NO: 4657 - RNA, 19 nt, Artificial Sequence
  Sythetic
cuugcuugaugauuuccag

SEQ ID NO: 4658 - RNA, 20 nt, Artificial Sequence
  Sythetic
ccuugcuugaugauuuccag

SEQ ID NO: 4659 - RNA, 21 nt, Artificial Sequence
  Sythetic
cccuugcuugaugauuuccag

SEQ ID NO: 4660 - RNA, 22 nt, Artificial Sequence
  Sythetic
acccuugcuugaugauuuccag

SEQ ID NO: 4661 - RNA, 23 nt, Artificial Sequence
  Sythetic
cacccuugcuugaugauuuccag

SEQ ID NO: 4662 - RNA, 24 nt, Artificial Sequence
  Sythetic
acacccuugcuugaugauuuccag

SEQ ID NO: 4663 - RNA, 18 nt, Artificial Sequence
  Sythetic
gacccucugcucacagag

SEQ ID NO: 4664 - RNA, 19 nt, Artificial Sequence
  Sythetic
ggacccucugcucacagag

SEQ ID NO: 4665 - RNA, 20 nt, Artificial Sequence
  Sythetic
uggacccucugcucacagag

SEQ ID NO: 4666 - RNA, 21 nt, Artificial Sequence
  Sythetic
cuggacccucugcucacagag

SEQ ID NO: 4667 - RNA, 22 nt, Artificial Sequence
  Sythetic
gcuggacccucugcucacagag

SEQ ID NO: 4668 - RNA, 23 nt, Artificial Sequence
  Sythetic
ggcuggacccucugcucacagag

SEQ ID NO: 4669 - RNA, 24 nt, Artificial Sequence
  Sythetic
aggcuggacccucugcucacagag

SEQ ID NO: 4670 - RNA, 18 nt, Artificial Sequence
  Sythetic
caggaugacaauaccagg

SEQ ID NO: 4671 - RNA, 19 nt, Artificial Sequence
  Sythetic
acaggaugacaauaccagg

SEQ ID NO: 4672 - RNA, 20 nt, Artificial Sequence
  Sythetic
gacaggaugacaauaccagg

SEQ ID NO: 4673 - RNA, 21 nt, Artificial Sequence
  Sythetic
ggacaggaugacaauaccagg

SEQ ID NO: 4674 - RNA, 22 nt, Artificial Sequence
  Sythetic
aggacaggaugacaauaccagg

SEQ ID NO: 4675 - RNA, 23 nt, Artificial Sequence
  Sythetic
caggacaggaugacaauaccagg

SEQ ID NO: 4676 - RNA, 24 nt, Artificial Sequence
  Sythetic
gcaggacaggaugacaauaccagg

SEQ ID NO: 4677 - RNA, 18 nt, Artificial Sequence
  Sythetic
caaccacccacaagucau

SEQ ID NO: 4678 - RNA, 19 nt, Artificial Sequence
  Sythetic
acaaccacccacaagucau

SEQ ID NO: 4679 - RNA, 20 nt, Artificial Sequence
  Sythetic
cacaaccacccacaagucau

SEQ ID NO: 4680 - RNA, 21 nt, Artificial Sequence
  Sythetic
acacaaccacccacaagucau

SEQ ID NO: 4681 - RNA, 22 nt, Artificial Sequence
  Sythetic
aacacaaccacccacaagucau

SEQ ID NO: 4682 - RNA, 23 nt, Artificial Sequence
  Sythetic
gaacacaaccacccacaagucau

SEQ ID NO: 4683 - RNA, 24 nt, Artificial Sequence
  Sythetic
ggaacacaaccacccacaagucau

SEQ ID NO: 4684 - RNA, 18 nt, Artificial Sequence
  Sythetic
ggcgaagaaagccaggau

SEQ ID NO: 4685 - RNA, 19 nt, Artificial Sequence
  Sythetic
aggcgaagaaagccaggau

SEQ ID NO: 4686 - RNA, 20 nt, Artificial Sequence
  Sythetic
caggcgaagaaagccaggau

SEQ ID NO: 4687 - RNA, 21 nt, Artificial Sequence
  Sythetic
acaggcgaagaaagccaggau

SEQ ID NO: 4688 - RNA, 22 nt, Artificial Sequence
  Sythetic
aacaggcgaagaaagccaggau

SEQ ID NO: 4689 - RNA, 23 nt, Artificial Sequence
  Sythetic
caacaggcgaagaaagccaggau

SEQ ID NO: 4690 - RNA, 24 nt, Artificial Sequence
  Sythetic
ccaacaggcgaagaaagccaggau

SEQ ID NO: 4691 - RNA, 18 nt, Artificial Sequence
  Sythetic
ugcgcuucugguggcccu

SEQ ID NO: 4692 - RNA, 19 nt, Artificial Sequence
  Sythetic
uugcgcuucugguggcccu

SEQ ID NO: 4693 - RNA, 20 nt, Artificial Sequence
  Sythetic
cuugcgcuucugguggcccu

SEQ ID NO: 4694 - RNA, 21 nt, Artificial Sequence
  Sythetic
ccuugcgcuucugguggcccu

SEQ ID NO: 4695 - RNA, 22 nt, Artificial Sequence
  Sythetic
gccuugcgcuucugguggcccu

SEQ ID NO: 4696 - RNA, 23 nt, Artificial Sequence
  Sythetic
ggccuugcgcuucugguggcccu

SEQ ID NO: 4697 - RNA, 24 nt, Artificial Sequence
  Sythetic
gggccuugcgcuucugguggcccu

SEQ ID NO: 4698 - RNA, 18 nt, Artificial Sequence
  Sythetic
ugagaacacugugcacaa

SEQ ID NO: 4699 - RNA, 19 nt, Artificial Sequence
  Sythetic
uugagaacacugugcacaa

SEQ ID NO: 4700 - RNA, 20 nt, Artificial Sequence
  Sythetic
uuugagaacacugugcacaa

SEQ ID NO: 4701 - RNA, 21 nt, Artificial Sequence
  Sythetic
guuugagaacacugugcacaa

SEQ ID NO: 4702 - RNA, 22 nt, Artificial Sequence
  Sythetic
aguuugagaacacugugcacaa

SEQ ID NO: 4703 - RNA, 23 nt, Artificial Sequence
  Sythetic
gaguuugagaacacugugcacaa

SEQ ID NO: 4704 - RNA, 24 nt, Artificial Sequence
  Sythetic
ugaguuugagaacacugugcacaa

SEQ ID NO: 4705 - RNA, 18 nt, Artificial Sequence
  Sythetic
gacauucaucuguuucca

SEQ ID NO: 4706 - RNA, 19 nt, Artificial Sequence
  Sythetic
ggacauucaucuguuucca

SEQ ID NO: 4707 - RNA, 20 nt, Artificial Sequence
  Sythetic
uggacauucaucuguuucca

SEQ ID NO: 4708 - RNA, 21 nt, Artificial Sequence
  Sythetic
guggacauucaucuguuucca

SEQ ID NO: 4709 - RNA, 22 nt, Artificial Sequence
  Sythetic
gguggacauucaucuguuucca

SEQ ID NO: 4710 - RNA, 23 nt, Artificial Sequence
  Sythetic
agguggacauucaucuguuucca

SEQ ID NO: 4711 - RNA, 24 nt, Artificial Sequence
  Sythetic
gagguggacauucaucuguuucca

SEQ ID NO: 4712 - RNA, 18 nt, Artificial Sequence
  Sythetic
cacucaccucugugagca

SEQ ID NO: 4713 - RNA, 19 nt, Artificial Sequence
  Sythetic
gcacucaccucugugagca

SEQ ID NO: 4714 - RNA, 20 nt, Artificial Sequence
  Sythetic
cgcacucaccucugugagca

SEQ ID NO: 4715 - RNA, 21 nt, Artificial Sequence
  Sythetic
acgcacucaccucugugagca

SEQ ID NO: 4716 - RNA, 22 nt, Artificial Sequence
  Sythetic
cacgcacucaccucugugagca

SEQ ID NO: 4717 - RNA, 23 nt, Artificial Sequence
  Sythetic
gcacgcacucaccucugugagca

SEQ ID NO: 4718 - RNA, 24 nt, Artificial Sequence
  Sythetic
agcacgcacucaccucugugagca

SEQ ID NO: 4719 - RNA, 18 nt, Artificial Sequence
  Sythetic
uccuggaaaucaucaagc

SEQ ID NO: 4720 - RNA, 19 nt, Artificial Sequence
  Sythetic
cuccuggaaaucaucaagc

SEQ ID NO: 4721 - RNA, 20 nt, Artificial Sequence
  Sythetic
ccuccuggaaaucaucaagc

SEQ ID NO: 4722 - RNA, 21 nt, Artificial Sequence
  Sythetic
uccuccuggaaaucaucaagc

SEQ ID NO: 4723 - RNA, 22 nt, Artificial Sequence
  Sythetic
auccuccuggaaaucaucaagc

SEQ ID NO: 4724 - RNA, 23 nt, Artificial Sequence
  Sythetic
cauccuccuggaaaucaucaagc

SEQ ID NO: 4725 - RNA, 24 nt, Artificial Sequence
  Sythetic
ucauccuccuggaaaucaucaagc

SEQ ID NO: 4726 - RNA, 18 nt, Artificial Sequence
  Sythetic
uuggcugccuuacuacau

SEQ ID NO: 4727 - RNA, 19 nt, Artificial Sequence
  Sythetic
guuggcugccuuacuacau

SEQ ID NO: 4728 - RNA, 20 nt, Artificial Sequence
  Sythetic
uguuggcugccuuacuacau

SEQ ID NO: 4729 - RNA, 21 nt, Artificial Sequence
  Sythetic
cuguuggcugccuuacuacau

SEQ ID NO: 4730 - RNA, 22 nt, Artificial Sequence
  Sythetic
ccuguuggcugccuuacuacau

SEQ ID NO: 4731 - RNA, 23 nt, Artificial Sequence
  Sythetic
gccuguuggcugccuuacuacau

SEQ ID NO: 4732 - RNA, 24 nt, Artificial Sequence
  Sythetic
cgccuguuggcugccuuacuacau

SEQ ID NO: 4733 - RNA, 18 nt, Artificial Sequence
  Sythetic
caucuguuuccacugagu

SEQ ID NO: 4734 - RNA, 19 nt, Artificial Sequence
  Sythetic
ucaucuguuuccacugagu

SEQ ID NO: 4735 - RNA, 20 nt, Artificial Sequence
  Sythetic
uucaucuguuuccacugagu

SEQ ID NO: 4736 - RNA, 21 nt, Artificial Sequence
  Sythetic
auucaucuguuuccacugagu

SEQ ID NO: 4737 - RNA, 22 nt, Artificial Sequence
  Sythetic
cauucaucuguuuccacugagu

SEQ ID NO: 4738 - RNA, 23 nt, Artificial Sequence
  Sythetic
acauucaucuguuuccacugagu

SEQ ID NO: 4739 - RNA, 24 nt, Artificial Sequence
  Sythetic
gacauucaucuguuuccacugagu

SEQ ID NO: 4740 - RNA, 18 nt, Artificial Sequence
  Sythetic
aaaucaucaagcaagggu

SEQ ID NO: 4741 - RNA, 19 nt, Artificial Sequence
  Sythetic
gaaaucaucaagcaagggu

SEQ ID NO: 4742 - RNA, 20 nt, Artificial Sequence
  Sythetic
ggaaaucaucaagcaagggu

SEQ ID NO: 4743 - RNA, 21 nt, Artificial Sequence
  Sythetic
uggaaaucaucaagcaagggu

SEQ ID NO: 4744 - RNA, 22 nt, Artificial Sequence
  Sythetic
cuggaaaucaucaagcaagggu

SEQ ID NO: 4745 - RNA, 23 nt, Artificial Sequence
  Sythetic
ccuggaaaucaucaagcaagggu

SEQ ID NO: 4746 - RNA, 24 nt, Artificial Sequence
  Sythetic
uccuggaaaucaucaagcaagggu

SEQ ID NO: 4747 - RNA, 18 nt, Artificial Sequence
  Sythetic
cuucuaccccaaugacuu

SEQ ID NO: 4748 - RNA, 19 nt, Artificial Sequence
  Sythetic
gcuucuaccccaaugacuu

SEQ ID NO: 4749 - RNA, 20 nt, Artificial Sequence
  Sythetic
cgcuucuaccccaaugacuu

SEQ ID NO: 4750 - RNA, 21 nt, Artificial Sequence
  Sythetic
ccgcuucuaccccaaugacuu

SEQ ID NO: 4751 - RNA, 22 nt, Artificial Sequence
  Sythetic
accgcuucuaccccaaugacuu

SEQ ID NO: 4752 - RNA, 23 nt, Artificial Sequence
  Sythetic
gaccgcuucuaccccaaugacuu

SEQ ID NO: 4753 - RNA, 24 nt, Artificial Sequence
  Sythetic
ugaccgcuucuaccccaaugacuu

SEQ ID NO: 4754 - RNA, 18 nt, Artificial Sequence
  Sythetic
aaccaugaugugcugaaa

SEQ ID NO: 4755 - RNA, 19 nt, Artificial Sequence
  Sythetic
caaccaugaugugcugaaa

SEQ ID NO: 4756 - RNA, 20 nt, Artificial Sequence
  Sythetic
ccaaccaugaugugcugaaa

SEQ ID NO: 4757 - RNA, 21 nt, Artificial Sequence
  Sythetic
gccaaccaugaugugcugaaa

SEQ ID NO: 4758 - RNA, 22 nt, Artificial Sequence
  Sythetic
ggccaaccaugaugugcugaaa

SEQ ID NO: 4759 - RNA, 23 nt, Artificial Sequence
  Sythetic
aggccaaccaugaugugcugaaa

SEQ ID NO: 4760 - RNA, 24 nt, Artificial Sequence
  Sythetic
aaggccaaccaugaugugcugaaa

SEQ ID NO: 4761 - RNA, 18 nt, Artificial Sequence
  Sythetic
gaugggguucagacaaca

SEQ ID NO: 4762 - RNA, 19 nt, Artificial Sequence
  Sythetic
ggaugggguucagacaaca

SEQ ID NO: 4763 - RNA, 20 nt, Artificial Sequence
  Sythetic
aggaugggguucagacaaca

SEQ ID NO: 4764 - RNA, 21 nt, Artificial Sequence
  Sythetic
gaggaugggguucagacaaca

SEQ ID NO: 4765 - RNA, 22 nt, Artificial Sequence
  Sythetic
agaggaugggguucagacaaca

SEQ ID NO: 4766 - RNA, 23 nt, Artificial Sequence
  Sythetic
uagaggaugggguucagacaaca

SEQ ID NO: 4767 - RNA, 24 nt, Artificial Sequence
  Sythetic
auagaggaugggguucagacaaca

SEQ ID NO: 4768 - RNA, 18 nt, Artificial Sequence
  Sythetic
guuuuaaauuuggcucca

SEQ ID NO: 4769 - RNA, 19 nt, Artificial Sequence
  Sythetic
gguuuuaaauuuggcucca

SEQ ID NO: 4770 - RNA, 20 nt, Artificial Sequence
  Sythetic
agguuuuaaauuuggcucca

SEQ ID NO: 4771 - RNA, 21 nt, Artificial Sequence
  Sythetic
gagguuuuaaauuuggcucca

SEQ ID NO: 4772 - RNA, 22 nt, Artificial Sequence
  Sythetic
agagguuuuaaauuuggcucca

SEQ ID NO: 4773 - RNA, 23 nt, Artificial Sequence
  Sythetic
cagagguuuuaaauuuggcucca

SEQ ID NO: 4774 - RNA, 24 nt, Artificial Sequence
  Sythetic
gcagagguuuuaaauuuggcucca

SEQ ID NO: 4775 - RNA, 18 nt, Artificial Sequence
  Sythetic
uuggcuccaaggaaagca

SEQ ID NO: 4776 - RNA, 19 nt, Artificial Sequence
  Sythetic
uuuggcuccaaggaaagca

SEQ ID NO: 4777 - RNA, 20 nt, Artificial Sequence
  Sythetic
auuuggcuccaaggaaagca

SEQ ID NO: 4778 - RNA, 21 nt, Artificial Sequence
  Sythetic
aauuuggcuccaaggaaagca

SEQ ID NO: 4779 - RNA, 22 nt, Artificial Sequence
  Sythetic
aaauuuggcuccaaggaaagca

SEQ ID NO: 4780 - RNA, 23 nt, Artificial Sequence
  Sythetic
uaaauuuggcuccaaggaaagca

SEQ ID NO: 4781 - RNA, 24 nt, Artificial Sequence
  Sythetic
uuaaauuuggcuccaaggaaagca

SEQ ID NO: 4782 - RNA, 18 nt, Artificial Sequence
  Sythetic
cuugaagacucagacuca

SEQ ID NO: 4783 - RNA, 19 nt, Artificial Sequence
  Sythetic
acuugaagacucagacuca

SEQ ID NO: 4784 - RNA, 20 nt, Artificial Sequence
  Sythetic
aacuugaagacucagacuca

SEQ ID NO: 4785 - RNA, 21 nt, Artificial Sequence
  Sythetic
aaacuugaagacucagacuca

SEQ ID NO: 4786 - RNA, 22 nt, Artificial Sequence
  Sythetic
aaaacuugaagacucagacuca

SEQ ID NO: 4787 - RNA, 23 nt, Artificial Sequence
  Sythetic
gaaaacuugaagacucagacuca

SEQ ID NO: 4788 - RNA, 24 nt, Artificial Sequence
  Sythetic
ugaaaacuugaagacucagacuca

SEQ ID NO: 4789 - RNA, 18 nt, Artificial Sequence
  Sythetic
ggcuggacccucugcuca

SEQ ID NO: 4790 - RNA, 19 nt, Artificial Sequence
  Sythetic
aggcuggacccucugcuca

SEQ ID NO: 4791 - RNA, 20 nt, Artificial Sequence
  Sythetic
gaggcuggacccucugcuca

SEQ ID NO: 4792 - RNA, 21 nt, Artificial Sequence
  Sythetic
ugaggcuggacccucugcuca

SEQ ID NO: 4793 - RNA, 22 nt, Artificial Sequence
  Sythetic
uugaggcuggacccucugcuca

SEQ ID NO: 4794 - RNA, 23 nt, Artificial Sequence
  Sythetic
cuugaggcuggacccucugcuca

SEQ ID NO: 4795 - RNA, 24 nt, Artificial Sequence
  Sythetic
ucuugaggcuggacccucugcuca

SEQ ID NO: 4796 - RNA, 18 nt, Artificial Sequence
  Sythetic
acaaccacccacaaguca

SEQ ID NO: 4797 - RNA, 19 nt, Artificial Sequence
  Sythetic
cacaaccacccacaaguca

SEQ ID NO: 4798 - RNA, 20 nt, Artificial Sequence
  Sythetic
acacaaccacccacaaguca

SEQ ID NO: 4799 - RNA, 21 nt, Artificial Sequence
  Sythetic
aacacaaccacccacaaguca

SEQ ID NO: 4800 - RNA, 22 nt, Artificial Sequence
  Sythetic
gaacacaaccacccacaaguca

SEQ ID NO: 4801 - RNA, 23 nt, Artificial Sequence
  Sythetic
ggaacacaaccacccacaaguca

SEQ ID NO: 4802 - RNA, 24 nt, Artificial Sequence
  Sythetic
uggaacacaaccacccacaaguca

SEQ ID NO: 4803 - RNA, 18 nt, Artificial Sequence
  Sythetic
acaucuguguuagcugga

SEQ ID NO: 4804 - RNA, 19 nt, Artificial Sequence
  Sythetic
uacaucuguguuagcugga

SEQ ID NO: 4805 - RNA, 20 nt, Artificial Sequence
  Sythetic
uuacaucuguguuagcugga

SEQ ID NO: 4806 - RNA, 21 nt, Artificial Sequence
  Sythetic
uuuacaucuguguuagcugga

SEQ ID NO: 4807 - RNA, 22 nt, Artificial Sequence
  Sythetic
uuuuacaucuguguuagcugga

SEQ ID NO: 4808 - RNA, 23 nt, Artificial Sequence
  Sythetic
cuuuuacaucuguguuagcugga

SEQ ID NO: 4809 - RNA, 24 nt, Artificial Sequence
  Sythetic
ucuuuuacaucuguguuagcugga

SEQ ID NO: 4810 - RNA, 18 nt, Artificial Sequence
  Sythetic
aagcuagggccucgguga

SEQ ID NO: 4811 - RNA, 19 nt, Artificial Sequence
  Sythetic
aaagcuagggccucgguga

SEQ ID NO: 4812 - RNA, 20 nt, Artificial Sequence
  Sythetic
gaaagcuagggccucgguga

SEQ ID NO: 4813 - RNA, 21 nt, Artificial Sequence
  Sythetic
agaaagcuagggccucgguga

SEQ ID NO: 4814 - RNA, 22 nt, Artificial Sequence
  Sythetic
aagaaagcuagggccucgguga

SEQ ID NO: 4815 - RNA, 23 nt, Artificial Sequence
  Sythetic
gaagaaagcuagggccucgguga

SEQ ID NO: 4816 - RNA, 24 nt, Artificial Sequence
  Sythetic
ggaagaaagcuagggccucgguga

SEQ ID NO: 4817 - RNA, 18 nt, Artificial Sequence
  Sythetic
guuagcuggagugaaaac

SEQ ID NO: 4818 - RNA, 19 nt, Artificial Sequence
  Sythetic
uguuagcuggagugaaaac

SEQ ID NO: 4819 - RNA, 20 nt, Artificial Sequence
  Sythetic
guguuagcuggagugaaaac

SEQ ID NO: 4820 - RNA, 21 nt, Artificial Sequence
  Sythetic
uguguuagcuggagugaaaac

SEQ ID NO: 4821 - RNA, 22 nt, Artificial Sequence
  Sythetic
cuguguuagcuggagugaaaac

SEQ ID NO: 4822 - RNA, 23 nt, Artificial Sequence
  Sythetic
ucuguguuagcuggagugaaaac

SEQ ID NO: 4823 - RNA, 24 nt, Artificial Sequence
  Sythetic
aucuguguuagcuggagugaaaac

SEQ ID NO: 4824 - RNA, 18 nt, Artificial Sequence
  Sythetic
accaugaugugcugaaac

SEQ ID NO: 4825 - RNA, 19 nt, Artificial Sequence
  Sythetic
aaccaugaugugcugaaac

SEQ ID NO: 4826 - RNA, 20 nt, Artificial Sequence
  Sythetic
caaccaugaugugcugaaac

SEQ ID NO: 4827 - RNA, 21 nt, Artificial Sequence
  Sythetic
ccaaccaugaugugcugaaac

SEQ ID NO: 4828 - RNA, 22 nt, Artificial Sequence
  Sythetic
gccaaccaugaugugcugaaac

SEQ ID NO: 4829 - RNA, 23 nt, Artificial Sequence
  Sythetic
ggccaaccaugaugugcugaaac

SEQ ID NO: 4830 - RNA, 24 nt, Artificial Sequence
  Sythetic
aggccaaccaugaugugcugaaac

SEQ ID NO: 4831 - RNA, 18 nt, Artificial Sequence
  Sythetic
uugcgcuucugguggccc

SEQ ID NO: 4832 - RNA, 19 nt, Artificial Sequence
  Sythetic
cuugcgcuucugguggccc

SEQ ID NO: 4833 - RNA, 20 nt, Artificial Sequence
  Sythetic
ccuugcgcuucugguggccc

SEQ ID NO: 4834 - RNA, 21 nt, Artificial Sequence
  Sythetic
gccuugcgcuucugguggccc

SEQ ID NO: 4835 - RNA, 22 nt, Artificial Sequence
  Sythetic
ggccuugcgcuucugguggccc

SEQ ID NO: 4836 - RNA, 23 nt, Artificial Sequence
  Sythetic
gggccuugcgcuucugguggccc

SEQ ID NO: 4837 - RNA, 24 nt, Artificial Sequence
  Sythetic
agggccuugcgcuucugguggccc

SEQ ID NO: 4838 - RNA, 18 nt, Artificial Sequence
  Sythetic
gguuuuaaauuuggcucc

SEQ ID NO: 4839 - RNA, 19 nt, Artificial Sequence
  Sythetic
agguuuuaaauuuggcucc

SEQ ID NO: 4840 - RNA, 20 nt, Artificial Sequence
  Sythetic
gagguuuuaaauuuggcucc

SEQ ID NO: 4841 - RNA, 21 nt, Artificial Sequence
  Sythetic
agagguuuuaaauuuggcucc

SEQ ID NO: 4842 - RNA, 22 nt, Artificial Sequence
  Sythetic
cagagguuuuaaauuuggcucc

SEQ ID NO: 4843 - RNA, 23 nt, Artificial Sequence
  Sythetic
gcagagguuuuaaauuuggcucc

SEQ ID NO: 4844 - RNA, 24 nt, Artificial Sequence
  Sythetic
ggcagagguuuuaaauuuggcucc

SEQ ID NO: 4845 - RNA, 18 nt, Artificial Sequence
  Sythetic
ccuugcuugaugauuucc

SEQ ID NO: 4846 - RNA, 19 nt, Artificial Sequence
  Sythetic
cccuugcuugaugauuucc

SEQ ID NO: 4847 - RNA, 20 nt, Artificial Sequence
  Sythetic
acccuugcuugaugauuucc

SEQ ID NO: 4848 - RNA, 21 nt, Artificial Sequence
  Sythetic
cacccuugcuugaugauuucc

SEQ ID NO: 4849 - RNA, 22 nt, Artificial Sequence
  Sythetic
acacccuugcuugaugauuucc

SEQ ID NO: 4850 - RNA, 23 nt, Artificial Sequence
  Sythetic
cacacccuugcuugaugauuucc

SEQ ID NO: 4851 - RNA, 24 nt, Artificial Sequence
  Sythetic
ucacacccuugcuugaugauuucc

SEQ ID NO: 4852 - RNA, 18 nt, Artificial Sequence
  Sythetic
acaacaguggaagaaagc

SEQ ID NO: 4853 - RNA, 19 nt, Artificial Sequence
  Sythetic
gacaacaguggaagaaagc

SEQ ID NO: 4854 - RNA, 20 nt, Artificial Sequence
  Sythetic
agacaacaguggaagaaagc

SEQ ID NO: 4855 - RNA, 21 nt, Artificial Sequence
  Sythetic
cagacaacaguggaagaaagc

SEQ ID NO: 4856 - RNA, 22 nt, Artificial Sequence
  Sythetic
ucagacaacaguggaagaaagc

SEQ ID NO: 4857 - RNA, 23 nt, Artificial Sequence
  Sythetic
uucagacaacaguggaagaaagc

SEQ ID NO: 4858 - RNA, 24 nt, Artificial Sequence
  Sythetic
guucagacaacaguggaagaaagc

SEQ ID NO: 4859 - RNA, 18 nt, Artificial Sequence
  Sythetic
cccuuggagugugacagc

SEQ ID NO: 4860 - RNA, 19 nt, Artificial Sequence
  Sythetic
gcccuuggagugugacagc

SEQ ID NO: 4861 - RNA, 20 nt, Artificial Sequence
  Sythetic
ggcccuuggagugugacagc

SEQ ID NO: 4862 - RNA, 21 nt, Artificial Sequence
  Sythetic
uggcccuuggagugugacagc

SEQ ID NO: 4863 - RNA, 22 nt, Artificial Sequence
  Sythetic
guggcccuuggagugugacagc

SEQ ID NO: 4864 - RNA, 23 nt, Artificial Sequence
  Sythetic
gguggcccuuggagugugacagc

SEQ ID NO: 4865 - RNA, 24 nt, Artificial Sequence
  Sythetic
ugguggcccuuggagugugacagc

SEQ ID NO: 4866 - RNA, 18 nt, Artificial Sequence
  Sythetic
aagucgggaauagucagc

SEQ ID NO: 4867 - RNA, 19 nt, Artificial Sequence
  Sythetic
gaagucgggaauagucagc

SEQ ID NO: 4868 - RNA, 20 nt, Artificial Sequence
  Sythetic
ugaagucgggaauagucagc

SEQ ID NO: 4869 - RNA, 21 nt, Artificial Sequence
  Sythetic
augaagucgggaauagucagc

SEQ ID NO: 4870 - RNA, 22 nt, Artificial Sequence
  Sythetic
gaugaagucgggaauagucagc

SEQ ID NO: 4871 - RNA, 23 nt, Artificial Sequence
  Sythetic
agaugaagucgggaauagucagc

SEQ ID NO: 4872 - RNA, 24 nt, Artificial Sequence
  Sythetic
aagaugaagucgggaauagucagc

SEQ ID NO: 4873 - RNA, 18 nt, Artificial Sequence
  Sythetic
uuuccuuuggagaggauc

SEQ ID NO: 4874 - RNA, 19 nt, Artificial Sequence
  Sythetic
cuuuccuuuggagaggauc

SEQ ID NO: 4875 - RNA, 20 nt, Artificial Sequence
  Sythetic
gcuuuccuuuggagaggauc

SEQ ID NO: 4876 - RNA, 21 nt, Artificial Sequence
  Sythetic
cgcuuuccuuuggagaggauc

SEQ ID NO: 4877 - RNA, 22 nt, Artificial Sequence
  Sythetic
ucgcuuuccuuuggagaggauc

SEQ ID NO: 4878 - RNA, 23 nt, Artificial Sequence
  Sythetic
cucgcuuuccuuuggagaggauc

SEQ ID NO: 4879 - RNA, 24 nt, Artificial Sequence
  Sythetic
ccucgcuuuccuuuggagaggauc

SEQ ID NO: 4880 - RNA, 18 nt, Artificial Sequence
  Sythetic
augaggaugacugugguc

SEQ ID NO: 4881 - RNA, 19 nt, Artificial Sequence
  Sythetic
gaugaggaugacugugguc

SEQ ID NO: 4882 - RNA, 20 nt, Artificial Sequence
  Sythetic
ggaugaggaugacugugguc

SEQ ID NO: 4883 - RNA, 21 nt, Artificial Sequence
  Sythetic
aggaugaggaugacugugguc

SEQ ID NO: 4884 - RNA, 22 nt, Artificial Sequence
  Sythetic
caggaugaggaugacugugguc

SEQ ID NO: 4885 - RNA, 23 nt, Artificial Sequence
  Sythetic
ccaggaugaggaugacugugguc

SEQ ID NO: 4886 - RNA, 24 nt, Artificial Sequence
  Sythetic
gccaggaugaggaugacugugguc

SEQ ID NO: 4887 - RNA, 18 nt, Artificial Sequence
  Sythetic
cccuugcuugaugauuuc

SEQ ID NO: 4888 - RNA, 19 nt, Artificial Sequence
  Sythetic
acccuugcuugaugauuuc

SEQ ID NO: 4889 - RNA, 20 nt, Artificial Sequence
  Sythetic
cacccuugcuugaugauuuc

SEQ ID NO: 4890 - RNA, 21 nt, Artificial Sequence
  Sythetic
acacccuugcuugaugauuuc

SEQ ID NO: 4891 - RNA, 22 nt, Artificial Sequence
  Sythetic
cacacccuugcuugaugauuuc

SEQ ID NO: 4892 - RNA, 23 nt, Artificial Sequence
  Sythetic
ucacacccuugcuugaugauuuc

SEQ ID NO: 4893 - RNA, 24 nt, Artificial Sequence
  Sythetic
cucacacccuugcuugaugauuuc

SEQ ID NO: 4894 - RNA, 18 nt, Artificial Sequence
  Sythetic
ucacugacguuggcaaag

SEQ ID NO: 4895 - RNA, 19 nt, Artificial Sequence
  Sythetic
cucacugacguuggcaaag

SEQ ID NO: 4896 - RNA, 20 nt, Artificial Sequence
  Sythetic
ccucacugacguuggcaaag

SEQ ID NO: 4897 - RNA, 21 nt, Artificial Sequence
  Sythetic
gccucacugacguuggcaaag

SEQ ID NO: 4898 - RNA, 22 nt, Artificial Sequence
  Sythetic
ugccucacugacguuggcaaag

SEQ ID NO: 4899 - RNA, 23 nt, Artificial Sequence
  Sythetic
cugccucacugacguuggcaaag

SEQ ID NO: 4900 - RNA, 24 nt, Artificial Sequence
  Sythetic
ucugccucacugacguuggcaaag

SEQ ID NO: 4901 - RNA, 18 nt, Artificial Sequence
  Sythetic
acguuggcaaagaugaag

SEQ ID NO: 4902 - RNA, 19 nt, Artificial Sequence
  Sythetic
gacguuggcaaagaugaag

SEQ ID NO: 4903 - RNA, 20 nt, Artificial Sequence
  Sythetic
ugacguuggcaaagaugaag

SEQ ID NO: 4904 - RNA, 21 nt, Artificial Sequence
  Sythetic
cugacguuggcaaagaugaag

SEQ ID NO: 4905 - RNA, 22 nt, Artificial Sequence
  Sythetic
acugacguuggcaaagaugaag

SEQ ID NO: 4906 - RNA, 23 nt, Artificial Sequence
  Sythetic
cacugacguuggcaaagaugaag

SEQ ID NO: 4907 - RNA, 24 nt, Artificial Sequence
  Sythetic
ucacugacguuggcaaagaugaag

SEQ ID NO: 4908 - RNA, 18 nt, Artificial Sequence
  Sythetic
augggguucagacaacag

SEQ ID NO: 4909 - RNA, 19 nt, Artificial Sequence
  Sythetic
gaugggguucagacaacag

SEQ ID NO: 4910 - RNA, 20 nt, Artificial Sequence
  Sythetic
ggaugggguucagacaacag

SEQ ID NO: 4911 - RNA, 21 nt, Artificial Sequence
  Sythetic
aggaugggguucagacaacag

SEQ ID NO: 4912 - RNA, 22 nt, Artificial Sequence
  Sythetic
gaggaugggguucagacaacag

SEQ ID NO: 4913 - RNA, 23 nt, Artificial Sequence
  Sythetic
agaggaugggguucagacaacag

SEQ ID NO: 4914 - RNA, 24 nt, Artificial Sequence
  Sythetic
uagaggaugggguucagacaacag

SEQ ID NO: 4915 - RNA, 18 nt, Artificial Sequence
  Sythetic
uaguaaggcagccaacag

SEQ ID NO: 4916 - RNA, 19 nt, Artificial Sequence
  Sythetic
guaguaaggcagccaacag

SEQ ID NO: 4917 - RNA, 20 nt, Artificial Sequence
  Sythetic
uguaguaaggcagccaacag

SEQ ID NO: 4918 - RNA, 21 nt, Artificial Sequence
  Sythetic
auguaguaaggcagccaacag

SEQ ID NO: 4919 - RNA, 22 nt, Artificial Sequence
  Sythetic
aauguaguaaggcagccaacag

SEQ ID NO: 4920 - RNA, 23 nt, Artificial Sequence
  Sythetic
caauguaguaaggcagccaacag

SEQ ID NO: 4921 - RNA, 24 nt, Artificial Sequence
  Sythetic
ccaauguaguaaggcagccaacag

SEQ ID NO: 4922 - RNA, 18 nt, Artificial Sequence
  Sythetic
gucgggaauagucagcag

SEQ ID NO: 4923 - RNA, 19 nt, Artificial Sequence
  Sythetic
agucgggaauagucagcag

SEQ ID NO: 4924 - RNA, 20 nt, Artificial Sequence
  Sythetic
aagucgggaauagucagcag

SEQ ID NO: 4925 - RNA, 21 nt, Artificial Sequence
  Sythetic
gaagucgggaauagucagcag

SEQ ID NO: 4926 - RNA, 22 nt, Artificial Sequence
  Sythetic
ugaagucgggaauagucagcag

SEQ ID NO: 4927 - RNA, 23 nt, Artificial Sequence
  Sythetic
augaagucgggaauagucagcag

SEQ ID NO: 4928 - RNA, 24 nt, Artificial Sequence
  Sythetic
gaugaagucgggaauagucagcag

SEQ ID NO: 4929 - RNA, 18 nt, Artificial Sequence
  Sythetic
uugaagacucagacucag

SEQ ID NO: 4930 - RNA, 19 nt, Artificial Sequence
  Sythetic
cuugaagacucagacucag

SEQ ID NO: 4931 - RNA, 20 nt, Artificial Sequence
  Sythetic
acuugaagacucagacucag

SEQ ID NO: 4932 - RNA, 21 nt, Artificial Sequence
  Sythetic
aacuugaagacucagacucag

SEQ ID NO: 4933 - RNA, 22 nt, Artificial Sequence
  Sythetic
aaacuugaagacucagacucag

SEQ ID NO: 4934 - RNA, 23 nt, Artificial Sequence
  Sythetic
aaaacuugaagacucagacucag

SEQ ID NO: 4935 - RNA, 24 nt, Artificial Sequence
  Sythetic
gaaaacuugaagacucagacucag

SEQ ID NO: 4936 - RNA, 18 nt, Artificial Sequence
  Sythetic
gaagucgggaauagucag

SEQ ID NO: 4937 - RNA, 19 nt, Artificial Sequence
  Sythetic
ugaagucgggaauagucag

SEQ ID NO: 4938 - RNA, 20 nt, Artificial Sequence
  Sythetic
augaagucgggaauagucag

SEQ ID NO: 4939 - RNA, 21 nt, Artificial Sequence
  Sythetic
gaugaagucgggaauagucag

SEQ ID NO: 4940 - RNA, 22 nt, Artificial Sequence
  Sythetic
agaugaagucgggaauagucag

SEQ ID NO: 4941 - RNA, 23 nt, Artificial Sequence
  Sythetic
aagaugaagucgggaauagucag

SEQ ID NO: 4942 - RNA, 24 nt, Artificial Sequence
  Sythetic
aaagaugaagucgggaauagucag

SEQ ID NO: 4943 - RNA, 18 nt, Artificial Sequence
  Sythetic
gagaugauaaugcaauag

SEQ ID NO: 4944 - RNA, 19 nt, Artificial Sequence
  Sythetic
ggagaugauaaugcaauag

SEQ ID NO: 4945 - RNA, 20 nt, Artificial Sequence
  Sythetic
uggagaugauaaugcaauag

SEQ ID NO: 4946 - RNA, 21 nt, Artificial Sequence
  Sythetic
uuggagaugauaaugcaauag

SEQ ID NO: 4947 - RNA, 22 nt, Artificial Sequence
  Sythetic
cuuggagaugauaaugcaauag

SEQ ID NO: 4948 - RNA, 23 nt, Artificial Sequence
  Sythetic
gcuuggagaugauaaugcaauag

SEQ ID NO: 4949 - RNA, 24 nt, Artificial Sequence
  Sythetic
agcuuggagaugauaaugcaauag

SEQ ID NO: 4950 - RNA, 18 nt, Artificial Sequence
  Sythetic
cuuuuacaucuguguuag

SEQ ID NO: 4951 - RNA, 19 nt, Artificial Sequence
  Sythetic
ucuuuuacaucuguguuag

SEQ ID NO: 4952 - RNA, 20 nt, Artificial Sequence
  Sythetic
gucuuuuacaucuguguuag

SEQ ID NO: 4953 - RNA, 21 nt, Artificial Sequence
  Sythetic
agucuuuuacaucuguguuag

SEQ ID NO: 4954 - RNA, 22 nt, Artificial Sequence
  Sythetic
aagucuuuuacaucuguguuag

SEQ ID NO: 4955 - RNA, 23 nt, Artificial Sequence
  Sythetic
aaagucuuuuacaucuguguuag

SEQ ID NO: 4956 - RNA, 24 nt, Artificial Sequence
  Sythetic
aaaagucuuuuacaucuguguuag

SEQ ID NO: 4957 - RNA, 18 nt, Artificial Sequence
  Sythetic
uaaggcagccaacaggcg

SEQ ID NO: 4958 - RNA, 19 nt, Artificial Sequence
  Sythetic
guaaggcagccaacaggcg

SEQ ID NO: 4959 - RNA, 20 nt, Artificial Sequence
  Sythetic
aguaaggcagccaacaggcg

SEQ ID NO: 4960 - RNA, 21 nt, Artificial Sequence
  Sythetic
uaguaaggcagccaacaggcg

SEQ ID NO: 4961 - RNA, 22 nt, Artificial Sequence
  Sythetic
guaguaaggcagccaacaggcg

SEQ ID NO: 4962 - RNA, 23 nt, Artificial Sequence
  Sythetic
uguaguaaggcagccaacaggcg

SEQ ID NO: 4963 - RNA, 24 nt, Artificial Sequence
  Sythetic
auguaguaaggcagccaacaggcg

SEQ ID NO: 4964 - RNA, 18 nt, Artificial Sequence
  Sythetic
caggcgaagaaagccagg

SEQ ID NO: 4965 - RNA, 19 nt, Artificial Sequence
  Sythetic
acaggcgaagaaagccagg

SEQ ID NO: 4966 - RNA, 20 nt, Artificial Sequence
  Sythetic
aacaggcgaagaaagccagg

SEQ ID NO: 4967 - RNA, 21 nt, Artificial Sequence
  Sythetic
caacaggcgaagaaagccagg

SEQ ID NO: 4968 - RNA, 22 nt, Artificial Sequence
  Sythetic
ccaacaggcgaagaaagccagg

SEQ ID NO: 4969 - RNA, 23 nt, Artificial Sequence
  Sythetic
gccaacaggcgaagaaagccagg

SEQ ID NO: 4970 - RNA, 24 nt, Artificial Sequence
  Sythetic
agccaacaggcgaagaaagccagg

SEQ ID NO: 4971 - RNA, 18 nt, Artificial Sequence
  Sythetic
ccaaggaaagcauagagg

SEQ ID NO: 4972 - RNA, 19 nt, Artificial Sequence
  Sythetic
uccaaggaaagcauagagg

SEQ ID NO: 4973 - RNA, 20 nt, Artificial Sequence
  Sythetic
cuccaaggaaagcauagagg

SEQ ID NO: 4974 - RNA, 21 nt, Artificial Sequence
  Sythetic
gcuccaaggaaagcauagagg

SEQ ID NO: 4975 - RNA, 22 nt, Artificial Sequence
  Sythetic
ggcuccaaggaaagcauagagg

SEQ ID NO: 4976 - RNA, 23 nt, Artificial Sequence
  Sythetic
uggcuccaaggaaagcauagagg

SEQ ID NO: 4977 - RNA, 24 nt, Artificial Sequence
  Sythetic
uuggcuccaaggaaagcauagagg

SEQ ID NO: 4978 - RNA, 18 nt, Artificial Sequence
  Sythetic
uugaugauuuccaggagg

SEQ ID NO: 4979 - RNA, 19 nt, Artificial Sequence
  Sythetic
cuugaugauuuccaggagg

SEQ ID NO: 4980 - RNA, 20 nt, Artificial Sequence
  Sythetic
gcuugaugauuuccaggagg

SEQ ID NO: 4981 - RNA, 21 nt, Artificial Sequence
  Sythetic
ugcuugaugauuuccaggagg

SEQ ID NO: 4982 - RNA, 22 nt, Artificial Sequence
  Sythetic
uugcuugaugauuuccaggagg

SEQ ID NO: 4983 - RNA, 23 nt, Artificial Sequence
  Sythetic
cuugcuugaugauuuccaggagg

SEQ ID NO: 4984 - RNA, 24 nt, Artificial Sequence
  Sythetic
ccuugcuugaugauuuccaggagg

SEQ ID NO: 4985 - RNA, 18 nt, Artificial Sequence
  Sythetic
uuggagaggaucuugagg

SEQ ID NO: 4986 - RNA, 19 nt, Artificial Sequence
  Sythetic
uuuggagaggaucuugagg

SEQ ID NO: 4987 - RNA, 20 nt, Artificial Sequence
  Sythetic
cuuuggagaggaucuugagg

SEQ ID NO: 4988 - RNA, 21 nt, Artificial Sequence
  Sythetic
ccuuuggagaggaucuugagg

SEQ ID NO: 4989 - RNA, 22 nt, Artificial Sequence
  Sythetic
uccuuuggagaggaucuugagg

SEQ ID NO: 4990 - RNA, 23 nt, Artificial Sequence
  Sythetic
uuccuuuggagaggaucuugagg

SEQ ID NO: 4991 - RNA, 24 nt, Artificial Sequence
  Sythetic
uuuccuuuggagaggaucuugagg

SEQ ID NO: 4992 - RNA, 18 nt, Artificial Sequence
  Sythetic
acccacaagucauugggg

SEQ ID NO: 4993 - RNA, 19 nt, Artificial Sequence
  Sythetic
cacccacaagucauugggg

SEQ ID NO: 4994 - RNA, 20 nt, Artificial Sequence
  Sythetic
ccacccacaagucauugggg

SEQ ID NO: 4995 - RNA, 21 nt, Artificial Sequence
  Sythetic
accacccacaagucauugggg

SEQ ID NO: 4996 - RNA, 22 nt, Artificial Sequence
  Sythetic
aaccacccacaagucauugggg

SEQ ID NO: 4997 - RNA, 23 nt, Artificial Sequence
  Sythetic
caaccacccacaagucauugggg

SEQ ID NO: 4998 - RNA, 24 nt, Artificial Sequence
  Sythetic
acaaccacccacaagucauugggg

SEQ ID NO: 4999 - RNA, 18 nt, Artificial Sequence
  Sythetic
aggugagugcgugcuggg

SEQ ID NO: 5000 - RNA, 19 nt, Artificial Sequence
  Sythetic
gaggugagugcgugcuggg

SEQ ID NO: 5001 - RNA, 20 nt, Artificial Sequence
  Sythetic
agaggugagugcgugcuggg

SEQ ID NO: 5002 - RNA, 21 nt, Artificial Sequence
  Sythetic
cagaggugagugcgugcuggg

SEQ ID NO: 5003 - RNA, 22 nt, Artificial Sequence
  Sythetic
acagaggugagugcgugcuggg

SEQ ID NO: 5004 - RNA, 23 nt, Artificial Sequence
  Sythetic
cacagaggugagugcgugcuggg

SEQ ID NO: 5005 - RNA, 24 nt, Artificial Sequence
  Sythetic
ucacagaggugagugcgugcuggg

SEQ ID NO: 5006 - RNA, 18 nt, Artificial Sequence
  Sythetic
ggguucagacaacagugg

SEQ ID NO: 5007 - RNA, 19 nt, Artificial Sequence
  Sythetic
gggguucagacaacagugg

SEQ ID NO: 5008 - RNA, 20 nt, Artificial Sequence
  Sythetic
ugggguucagacaacagugg

SEQ ID NO: 5009 - RNA, 21 nt, Artificial Sequence
  Sythetic
augggguucagacaacagugg

SEQ ID NO: 5010 - RNA, 22 nt, Artificial Sequence
  Sythetic
gaugggguucagacaacagugg

SEQ ID NO: 5011 - RNA, 23 nt, Artificial Sequence
  Sythetic
ggaugggguucagacaacagugg

SEQ ID NO: 5012 - RNA, 24 nt, Artificial Sequence
  Sythetic
aggaugggguucagacaacagugg

SEQ ID NO: 5013 - RNA, 18 nt, Artificial Sequence
  Sythetic
augauuuccaggaggaug

SEQ ID NO: 5014 - RNA, 19 nt, Artificial Sequence
  Sythetic
gaugauuuccaggaggaug

SEQ ID NO: 5015 - RNA, 20 nt, Artificial Sequence
  Sythetic
ugaugauuuccaggaggaug

SEQ ID NO: 5016 - RNA, 21 nt, Artificial Sequence
  Sythetic
uugaugauuuccaggaggaug

SEQ ID NO: 5017 - RNA, 22 nt, Artificial Sequence
  Sythetic
cuugaugauuuccaggaggaug

SEQ ID NO: 5018 - RNA, 23 nt, Artificial Sequence
  Sythetic
gcuugaugauuuccaggaggaug

SEQ ID NO: 5019 - RNA, 24 nt, Artificial Sequence
  Sythetic
ugcuugaugauuuccaggaggaug

SEQ ID NO: 5020 - RNA, 18 nt, Artificial Sequence
  Sythetic
cacagaggugagugcgug

SEQ ID NO: 5021 - RNA, 19 nt, Artificial Sequence
  Sythetic
ucacagaggugagugcgug

SEQ ID NO: 5022 - RNA, 20 nt, Artificial Sequence
  Sythetic
cucacagaggugagugcgug

SEQ ID NO: 5023 - RNA, 21 nt, Artificial Sequence
  Sythetic
gcucacagaggugagugcgug

SEQ ID NO: 5024 - RNA, 22 nt, Artificial Sequence
  Sythetic
ugcucacagaggugagugcgug

SEQ ID NO: 5025 - RNA, 23 nt, Artificial Sequence
  Sythetic
cugcucacagaggugagugcgug

SEQ ID NO: 5026 - RNA, 24 nt, Artificial Sequence
  Sythetic
ucugcucacagaggugagugcgug

SEQ ID NO: 5027 - RNA, 18 nt, Artificial Sequence
  Sythetic
aaagcuagggccucggug

SEQ ID NO: 5028 - RNA, 19 nt, Artificial Sequence
  Sythetic
gaaagcuagggccucggug

SEQ ID NO: 5029 - RNA, 20 nt, Artificial Sequence
  Sythetic
agaaagcuagggccucggug

SEQ ID NO: 5030 - RNA, 21 nt, Artificial Sequence
  Sythetic
aagaaagcuagggccucggug

SEQ ID NO: 5031 - RNA, 22 nt, Artificial Sequence
  Sythetic
gaagaaagcuagggccucggug

SEQ ID NO: 5032 - RNA, 23 nt, Artificial Sequence
  Sythetic
ggaagaaagcuagggccucggug

SEQ ID NO: 5033 - RNA, 24 nt, Artificial Sequence
  Sythetic
uggaagaaagcuagggccucggug

SEQ ID NO: 5034 - RNA, 18 nt, Artificial Sequence
  Sythetic
aaggccaaccaugaugug

SEQ ID NO: 5035 - RNA, 19 nt, Artificial Sequence
  Sythetic
uaaggccaaccaugaugug

SEQ ID NO: 5036 - RNA, 20 nt, Artificial Sequence
  Sythetic
auaaggccaaccaugaugug

SEQ ID NO: 5037 - RNA, 21 nt, Artificial Sequence
  Sythetic
gauaaggccaaccaugaugug

SEQ ID NO: 5038 - RNA, 22 nt, Artificial Sequence
  Sythetic
ggauaaggccaaccaugaugug

SEQ ID NO: 5039 - RNA, 23 nt, Artificial Sequence
  Sythetic
aggauaaggccaaccaugaugug

SEQ ID NO: 5040 - RNA, 24 nt, Artificial Sequence
  Sythetic
caggauaaggccaaccaugaugug

SEQ ID NO: 5041 - RNA, 18 nt, Artificial Sequence
  Sythetic
ccaccucgcuuuccuuug

SEQ ID NO: 5042 - RNA, 19 nt, Artificial Sequence
  Sythetic
uccaccucgcuuuccuuug

SEQ ID NO: 5043 - RNA, 20 nt, Artificial Sequence
  Sythetic
guccaccucgcuuuccuuug

SEQ ID NO: 5044 - RNA, 21 nt, Artificial Sequence
  Sythetic
uguccaccucgcuuuccuuug

SEQ ID NO: 5045 - RNA, 22 nt, Artificial Sequence
  Sythetic
auguccaccucgcuuuccuuug

SEQ ID NO: 5046 - RNA, 23 nt, Artificial Sequence
  Sythetic
aauguccaccucgcuuuccuuug

SEQ ID NO: 5047 - RNA, 24 nt, Artificial Sequence
  Sythetic
gaauguccaccucgcuuuccuuug

SEQ ID NO: 5048 - RNA, 18 nt, Artificial Sequence
  Sythetic
uguccaccucgcuuuccu

SEQ ID NO: 5049 - RNA, 19 nt, Artificial Sequence
  Sythetic
auguccaccucgcuuuccu

SEQ ID NO: 5050 - RNA, 20 nt, Artificial Sequence
  Sythetic
aauguccaccucgcuuuccu

SEQ ID NO: 5051 - RNA, 21 nt, Artificial Sequence
  Sythetic
gaauguccaccucgcuuuccu

SEQ ID NO: 5052 - RNA, 22 nt, Artificial Sequence
  Sythetic
ugaauguccaccucgcuuuccu

SEQ ID NO: 5053 - RNA, 23 nt, Artificial Sequence
  Sythetic
augaauguccaccucgcuuuccu

SEQ ID NO: 5054 - RNA, 24 nt, Artificial Sequence
  Sythetic
gaugaauguccaccucgcuuuccu

SEQ ID NO: 5055 - RNA, 18 nt, Artificial Sequence
  Sythetic
ccuuggagugugacagcu

SEQ ID NO: 5056 - RNA, 19 nt, Artificial Sequence
  Sythetic
cccuuggagugugacagcu

SEQ ID NO: 5057 - RNA, 20 nt, Artificial Sequence
  Sythetic
gcccuuggagugugacagcu

SEQ ID NO: 5058 - RNA, 21 nt, Artificial Sequence
  Sythetic
ggcccuuggagugugacagcu

SEQ ID NO: 5059 - RNA, 22 nt, Artificial Sequence
  Sythetic
uggcccuuggagugugacagcu

SEQ ID NO: 5060 - RNA, 23 nt, Artificial Sequence
  Sythetic
guggcccuuggagugugacagcu

SEQ ID NO: 5061 - RNA, 24 nt, Artificial Sequence
  Sythetic
gguggcccuuggagugugacagcu

SEQ ID NO: 5062 - RNA, 18 nt, Artificial Sequence
  Sythetic
cguuggcaaagaugaagu

SEQ ID NO: 5063 - RNA, 19 nt, Artificial Sequence
  Sythetic
acguuggcaaagaugaagu

SEQ ID NO: 5064 - RNA, 20 nt, Artificial Sequence
  Sythetic
gacguuggcaaagaugaagu

SEQ ID NO: 5065 - RNA, 21 nt, Artificial Sequence
  Sythetic
ugacguuggcaaagaugaagu

SEQ ID NO: 5066 - RNA, 22 nt, Artificial Sequence
  Sythetic
cugacguuggcaaagaugaagu

SEQ ID NO: 5067 - RNA, 23 nt, Artificial Sequence
  Sythetic
acugacguuggcaaagaugaagu

SEQ ID NO: 5068 - RNA, 24 nt, Artificial Sequence
  Sythetic
cacugacguuggcaaagaugaagu

SEQ ID NO: 5069 - RNA, 18 nt, Artificial Sequence
  Sythetic
guccaccucgcuuuccuu

SEQ ID NO: 5070 - RNA, 19 nt, Artificial Sequence
  Sythetic
uguccaccucgcuuuccuu

SEQ ID NO: 5071 - RNA, 20 nt, Artificial Sequence
  Sythetic
auguccaccucgcuuuccuu

SEQ ID NO: 5072 - RNA, 21 nt, Artificial Sequence
  Sythetic
aauguccaccucgcuuuccuu

SEQ ID NO: 5073 - RNA, 22 nt, Artificial Sequence
  Sythetic
gaauguccaccucgcuuuccuu

SEQ ID NO: 5074 - RNA, 23 nt, Artificial Sequence
  Sythetic
ugaauguccaccucgcuuuccuu

SEQ ID NO: 5075 - RNA, 24 nt, Artificial Sequence
  Sythetic
augaauguccaccucgcuuuccuu

SEQ ID NO: 5076 - RNA, 18 nt, Artificial Sequence
  Sythetic
gaggaugacuguggucuu

SEQ ID NO: 5077 - RNA, 19 nt, Artificial Sequence
  Sythetic
ugaggaugacuguggucuu

SEQ ID NO: 5078 - RNA, 20 nt, Artificial Sequence
  Sythetic
augaggaugacuguggucuu

SEQ ID NO: 5079 - RNA, 21 nt, Artificial Sequence
  Sythetic
gaugaggaugacuguggucuu

SEQ ID NO: 5080 - RNA, 22 nt, Artificial Sequence
  Sythetic
ggaugaggaugacuguggucuu

SEQ ID NO: 5081 - RNA, 23 nt, Artificial Sequence
  Sythetic
aggaugaggaugacuguggucuu

SEQ ID NO: 5082 - RNA, 24 nt, Artificial Sequence
  Sythetic
caggaugaggaugacuguggucuu

SEQ ID NO: 5083 - RNA, 18 nt, Artificial Sequence
  Sythetic
gauccucuccaaaggaaa

SEQ ID NO: 5084 - RNA, 19 nt, Artificial Sequence
  Sythetic
agauccucuccaaaggaaa

SEQ ID NO: 5085 - RNA, 20 nt, Artificial Sequence
  Sythetic
aagauccucuccaaaggaaa

SEQ ID NO: 5086 - RNA, 21 nt, Artificial Sequence
  Sythetic
caagauccucuccaaaggaaa

SEQ ID NO: 5087 - RNA, 22 nt, Artificial Sequence
  Sythetic
ucaagauccucuccaaaggaaa

SEQ ID NO: 5088 - RNA, 23 nt, Artificial Sequence
  Sythetic
cucaagauccucuccaaaggaaa

SEQ ID NO: 5089 - RNA, 24 nt, Artificial Sequence
  Sythetic
ccucaagauccucuccaaaggaaa

SEQ ID NO: 5090 - RNA, 18 nt, Artificial Sequence
  Sythetic
ccucaagauccucuccaa

SEQ ID NO: 5091 - RNA, 19 nt, Artificial Sequence
  Sythetic
gccucaagauccucuccaa

SEQ ID NO: 5092 - RNA, 20 nt, Artificial Sequence
  Sythetic
agccucaagauccucuccaa

SEQ ID NO: 5093 - RNA, 21 nt, Artificial Sequence
  Sythetic
cagccucaagauccucuccaa

SEQ ID NO: 5094 - RNA, 22 nt, Artificial Sequence
  Sythetic
ccagccucaagauccucuccaa

SEQ ID NO: 5095 - RNA, 23 nt, Artificial Sequence
  Sythetic
uccagccucaagauccucuccaa

SEQ ID NO: 5096 - RNA, 24 nt, Artificial Sequence
  Sythetic
guccagccucaagauccucuccaa

SEQ ID NO: 5097 - RNA, 18 nt, Artificial Sequence
  Sythetic
guuggcugccuuacuaca

SEQ ID NO: 5098 - RNA, 19 nt, Artificial Sequence
  Sythetic
uguuggcugccuuacuaca

SEQ ID NO: 5099 - RNA, 20 nt, Artificial Sequence
  Sythetic
cuguuggcugccuuacuaca

SEQ ID NO: 5100 - RNA, 21 nt, Artificial Sequence
  Sythetic
ccuguuggcugccuuacuaca

SEQ ID NO: 5101 - RNA, 22 nt, Artificial Sequence
  Sythetic
gccuguuggcugccuuacuaca

SEQ ID NO: 5102 - RNA, 23 nt, Artificial Sequence
  Sythetic
cgccuguuggcugccuuacuaca

SEQ ID NO: 5103 - RNA, 24 nt, Artificial Sequence
  Sythetic
ucgccuguuggcugccuuacuaca

SEQ ID NO: 5104 - RNA, 18 nt, Artificial Sequence
  Sythetic
gccucaagauccucucca

SEQ ID NO: 5105 - RNA, 19 nt, Artificial Sequence
  Sythetic
agccucaagauccucucca

SEQ ID NO: 5106 - RNA, 20 nt, Artificial Sequence
  Sythetic
cagccucaagauccucucca

SEQ ID NO: 5107 - RNA, 21 nt, Artificial Sequence
  Sythetic
ccagccucaagauccucucca

SEQ ID NO: 5108 - RNA, 22 nt, Artificial Sequence
  Sythetic
uccagccucaagauccucucca

SEQ ID NO: 5109 - RNA, 23 nt, Artificial Sequence
  Sythetic
guccagccucaagauccucucca

SEQ ID NO: 5110 - RNA, 24 nt, Artificial Sequence
  Sythetic
gguccagccucaagauccucucca

SEQ ID NO: 5111 - RNA, 18 nt, Artificial Sequence
  Sythetic
acaaguggauuuccauca

SEQ ID NO: 5112 - RNA, 19 nt, Artificial Sequence
  Sythetic
cacaaguggauuuccauca

SEQ ID NO: 5113 - RNA, 20 nt, Artificial Sequence
  Sythetic
gcacaaguggauuuccauca

SEQ ID NO: 5114 - RNA, 21 nt, Artificial Sequence
  Sythetic
ugcacaaguggauuuccauca

SEQ ID NO: 5115 - RNA, 22 nt, Artificial Sequence
  Sythetic
gugcacaaguggauuuccauca

SEQ ID NO: 5116 - RNA, 23 nt, Artificial Sequence
  Sythetic
ugugcacaaguggauuuccauca

SEQ ID NO: 5117 - RNA, 24 nt, Artificial Sequence
  Sythetic
cugugcacaaguggauuuccauca

SEQ ID NO: 5118 - RNA, 18 nt, Artificial Sequence
  Sythetic
ucaucuuugccaacguca

SEQ ID NO: 5119 - RNA, 19 nt, Artificial Sequence
  Sythetic
uucaucuuugccaacguca

SEQ ID NO: 5120 - RNA, 20 nt, Artificial Sequence
  Sythetic
cuucaucuuugccaacguca

SEQ ID NO: 5121 - RNA, 21 nt, Artificial Sequence
  Sythetic
acuucaucuuugccaacguca

SEQ ID NO: 5122 - RNA, 22 nt, Artificial Sequence
  Sythetic
gacuucaucuuugccaacguca

SEQ ID NO: 5123 - RNA, 23 nt, Artificial Sequence
  Sythetic
cgacuucaucuuugccaacguca

SEQ ID NO: 5124 - RNA, 24 nt, Artificial Sequence
  Sythetic
ccgacuucaucuuugccaacguca

SEQ ID NO: 5125 - RNA, 18 nt, Artificial Sequence
  Sythetic
ucacacuccaagggccac

SEQ ID NO: 5126 - RNA, 19 nt, Artificial Sequence
  Sythetic
gucacacuccaagggccac

SEQ ID NO: 5127 - RNA, 20 nt, Artificial Sequence
  Sythetic
ugucacacuccaagggccac

SEQ ID NO: 5128 - RNA, 21 nt, Artificial Sequence
  Sythetic
cugucacacuccaagggccac

SEQ ID NO: 5129 - RNA, 22 nt, Artificial Sequence
  Sythetic
gcugucacacuccaagggccac

SEQ ID NO: 5130 - RNA, 23 nt, Artificial Sequence
  Sythetic
agcugucacacuccaagggccac

SEQ ID NO: 5131 - RNA, 24 nt, Artificial Sequence
  Sythetic
aagcugucacacuccaagggccac

SEQ ID NO: 5132 - RNA, 18 nt, Artificial Sequence
  Sythetic
uccaagcugucacacucc

SEQ ID NO: 5133 - RNA, 19 nt, Artificial Sequence
  Sythetic
cuccaagcugucacacucc

SEQ ID NO: 5134 - RNA, 20 nt, Artificial Sequence
  Sythetic
ucuccaagcugucacacucc

SEQ ID NO: 5135 - RNA, 21 nt, Artificial Sequence
  Sythetic
aucuccaagcugucacacucc

SEQ ID NO: 5136 - RNA, 22 nt, Artificial Sequence
  Sythetic
caucuccaagcugucacacucc

SEQ ID NO: 5137 - RNA, 23 nt, Artificial Sequence
  Sythetic
ucaucuccaagcugucacacucc

SEQ ID NO: 5138 - RNA, 24 nt, Artificial Sequence
  Sythetic
aucaucuccaagcugucacacucc

SEQ ID NO: 5139 - RNA, 18 nt, Artificial Sequence
  Sythetic
ucgacuccuucauccucc

SEQ ID NO: 5140 - RNA, 19 nt, Artificial Sequence
  Sythetic
aucgacuccuucauccucc

SEQ ID NO: 5141 - RNA, 20 nt, Artificial Sequence
  Sythetic
caucgacuccuucauccucc

SEQ ID NO: 5142 - RNA, 21 nt, Artificial Sequence
  Sythetic
gcaucgacuccuucauccucc

SEQ ID NO: 5143 - RNA, 22 nt, Artificial Sequence
  Sythetic
agcaucgacuccuucauccucc

SEQ ID NO: 5144 - RNA, 23 nt, Artificial Sequence
  Sythetic
cagcaucgacuccuucauccucc

SEQ ID NO: 5145 - RNA, 24 nt, Artificial Sequence
  Sythetic
ucagcaucgacuccuucauccucc

SEQ ID NO: 5146 - RNA, 18 nt, Artificial Sequence
  Sythetic
ccauccucuaugcuuucc

SEQ ID NO: 5147 - RNA, 19 nt, Artificial Sequence
  Sythetic
cccauccucuaugcuuucc

SEQ ID NO: 5148 - RNA, 20 nt, Artificial Sequence
  Sythetic
ccccauccucuaugcuuucc

SEQ ID NO: 5149 - RNA, 21 nt, Artificial Sequence
  Sythetic
accccauccucuaugcuuucc

SEQ ID NO: 5150 - RNA, 22 nt, Artificial Sequence
  Sythetic
aaccccauccucuaugcuuucc

SEQ ID NO: 5151 - RNA, 23 nt, Artificial Sequence
  Sythetic
gaaccccauccucuaugcuuucc

SEQ ID NO: 5152 - RNA, 24 nt, Artificial Sequence
  Sythetic
ugaaccccauccucuaugcuuucc

SEQ ID NO: 5153 - RNA, 18 nt, Artificial Sequence
  Sythetic
aucgacuccuucauccuc

SEQ ID NO: 5154 - RNA, 19 nt, Artificial Sequence
  Sythetic
caucgacuccuucauccuc

SEQ ID NO: 5155 - RNA, 20 nt, Artificial Sequence
  Sythetic
gcaucgacuccuucauccuc

SEQ ID NO: 5156 - RNA, 21 nt, Artificial Sequence
  Sythetic
agcaucgacuccuucauccuc

SEQ ID NO: 5157 - RNA, 22 nt, Artificial Sequence
  Sythetic
cagcaucgacuccuucauccuc

SEQ ID NO: 5158 - RNA, 23 nt, Artificial Sequence
  Sythetic
ucagcaucgacuccuucauccuc

SEQ ID NO: 5159 - RNA, 24 nt, Artificial Sequence
  Sythetic
aucagcaucgacuccuucauccuc

SEQ ID NO: 5160 - RNA, 18 nt, Artificial Sequence
  Sythetic
ucuccaaaggaaagcgag

SEQ ID NO: 5161 - RNA, 19 nt, Artificial Sequence
  Sythetic
cucuccaaaggaaagcgag

SEQ ID NO: 5162 - RNA, 20 nt, Artificial Sequence
  Sythetic
ccucuccaaaggaaagcgag

SEQ ID NO: 5163 - RNA, 21 nt, Artificial Sequence
  Sythetic
uccucuccaaaggaaagcgag

SEQ ID NO: 5164 - RNA, 22 nt, Artificial Sequence
  Sythetic
auccucuccaaaggaaagcgag

SEQ ID NO: 5165 - RNA, 23 nt, Artificial Sequence
  Sythetic
gauccucuccaaaggaaagcgag

SEQ ID NO: 5166 - RNA, 24 nt, Artificial Sequence
  Sythetic
agauccucuccaaaggaaagcgag

SEQ ID NO: 5167 - RNA, 18 nt, Artificial Sequence
  Sythetic
cgcacucaccucugugag

SEQ ID NO: 5168 - RNA, 19 nt, Artificial Sequence
  Sythetic
acgcacucaccucugugag

SEQ ID NO: 5169 - RNA, 20 nt, Artificial Sequence
  Sythetic
cacgcacucaccucugugag

SEQ ID NO: 5170 - RNA, 21 nt, Artificial Sequence
  Sythetic
gcacgcacucaccucugugag

SEQ ID NO: 5171 - RNA, 22 nt, Artificial Sequence
  Sythetic
agcacgcacucaccucugugag

SEQ ID NO: 5172 - RNA, 23 nt, Artificial Sequence
  Sythetic
cagcacgcacucaccucugugag

SEQ ID NO: 5173 - RNA, 24 nt, Artificial Sequence
  Sythetic
ccagcacgcacucaccucugugag

SEQ ID NO: 5174 - RNA, 18 nt, Artificial Sequence
  Sythetic
cauccucuaugcuuuccu

SEQ ID NO: 5175 - RNA, 19 nt, Artificial Sequence
  Sythetic
ccauccucuaugcuuuccu

SEQ ID NO: 5176 - RNA, 20 nt, Artificial Sequence
  Sythetic
cccauccucuaugcuuuccu

SEQ ID NO: 5177 - RNA, 21 nt, Artificial Sequence
  Sythetic
ccccauccucuaugcuuuccu

SEQ ID NO: 5178 - RNA, 22 nt, Artificial Sequence
  Sythetic
accccauccucuaugcuuuccu

SEQ ID NO: 5179 - RNA, 23 nt, Artificial Sequence
  Sythetic
aaccccauccucuaugcuuuccu

SEQ ID NO: 5180 - RNA, 24 nt, Artificial Sequence
  Sythetic
gaaccccauccucuaugcuuuccu

SEQ ID NO: 5181 - RNA, 18 nt, Artificial Sequence
  Sythetic
cagcacgcacucaccucu

SEQ ID NO: 5182 - RNA, 19 nt, Artificial Sequence
  Sythetic
ccagcacgcacucaccucu

SEQ ID NO: 5183 - RNA, 20 nt, Artificial Sequence
  Sythetic
cccagcacgcacucaccucu

SEQ ID NO: 5184 - RNA, 21 nt, Artificial Sequence
  Sythetic
gcccagcacgcacucaccucu

SEQ ID NO: 5185 - RNA, 22 nt, Artificial Sequence
  Sythetic
ugcccagcacgcacucaccucu

SEQ ID NO: 5186 - RNA, 23 nt, Artificial Sequence
  Sythetic
cugcccagcacgcacucaccucu

SEQ ID NO: 5187 - RNA, 24 nt, Artificial Sequence
  Sythetic
ucugcccagcacgcacucaccucu

SEQ ID NO: 5188 - RNA, 18 nt, Artificial Sequence
  Sythetic
ucaagcaagggugugagu

SEQ ID NO: 5189 - RNA, 19 nt, Artificial Sequence
  Sythetic
aucaagcaagggugugagu

SEQ ID NO: 5190 - RNA, 20 nt, Artificial Sequence
  Sythetic
caucaagcaagggugugagu

SEQ ID NO: 5191 - RNA, 21 nt, Artificial Sequence
  Sythetic
ucaucaagcaagggugugagu

SEQ ID NO: 5192 - RNA, 22 nt, Artificial Sequence
  Sythetic
aucaucaagcaagggugugagu

SEQ ID NO: 5193 - RNA, 23 nt, Artificial Sequence
  Sythetic
aaucaucaagcaagggugugagu

SEQ ID NO: 5194 - RNA, 24 nt, Artificial Sequence
  Sythetic
aaaucaucaagcaagggugugagu

SEQ ID NO: 5195 - RNA, 18 nt, Artificial Sequence
  Sythetic
gcuuucuuccacuguugu

SEQ ID NO: 5196 - RNA, 19 nt, Artificial Sequence
  Sythetic
agcuuucuuccacuguugu

SEQ ID NO: 5197 - RNA, 20 nt, Artificial Sequence
  Sythetic
uagcuuucuuccacuguugu

SEQ ID NO: 5198 - RNA, 21 nt, Artificial Sequence
  Sythetic
cuagcuuucuuccacuguugu

SEQ ID NO: 5199 - RNA, 22 nt, Artificial Sequence
  Sythetic
ccuagcuuucuuccacuguugu

SEQ ID NO: 5200 - RNA, 23 nt, Artificial Sequence
  Sythetic
cccuagcuuucuuccacuguugu

SEQ ID NO: 5201 - RNA, 24 nt, Artificial Sequence
  Sythetic
gcccuagcuuucuuccacuguugu

SEQ ID NO: 5202 - RNA, 18 nt, Artificial Sequence
  Sythetic
aagcaagggugugaguuu

SEQ ID NO: 5203 - RNA, 19 nt, Artificial Sequence
  Sythetic
caagcaagggugugaguuu

SEQ ID NO: 5204 - RNA, 20 nt, Artificial Sequence
  Sythetic
ucaagcaagggugugaguuu

SEQ ID NO: 5205 - RNA, 21 nt, Artificial Sequence
  Sythetic
aucaagcaagggugugaguuu

SEQ ID NO: 5206 - RNA, 22 nt, Artificial Sequence
  Sythetic
caucaagcaagggugugaguuu

SEQ ID NO: 5207 - RNA, 23 nt, Artificial Sequence
  Sythetic
ucaucaagcaagggugugaguuu

SEQ ID NO: 5208 - RNA, 24 nt, Artificial Sequence
  Sythetic
aucaucaagcaagggugugaguuu

SEQ ID NO: 5209 - RNA, 17 nt, Artificial Sequence
  Sythetic
ggaguagauggugggca

SEQ ID NO: 5210 - RNA, 17 nt, Artificial Sequence
  Sythetic
cgaccuccucuuuguca

SEQ ID NO: 5211 - RNA, 17 nt, Artificial Sequence
  Sythetic
guguaaguccaguuuca

SEQ ID NO: 5212 - RNA, 17 nt, Artificial Sequence
  Sythetic
uaacuggcauugugggc

SEQ ID NO: 5213 - RNA, 17 nt, Artificial Sequence
  Sythetic
cagccuguacuuguccg

SEQ ID NO: 5214 - RNA, 20 nt, Artificial Sequence
  Sythetic
gauggaguagauggugggca

SEQ ID NO: 5215 - RNA, 20 nt, Artificial Sequence
  Sythetic
ggccgaccuccucuuuguca

SEQ ID NO: 5216 - RNA, 20 nt, Artificial Sequence
  Sythetic
ucaguguaaguccaguuuca

SEQ ID NO: 5217 - RNA, 20 nt, Artificial Sequence
  Sythetic
cauagaccaccuuuucagcc

SEQ ID NO: 5218 - RNA, 20 nt, Artificial Sequence
  Sythetic
ucuuaacuggcauugugggc

SEQ ID NO: 5219 - RNA, 20 nt, Artificial Sequence
  Sythetic
gugcagccuguacuuguccg

SEQ ID NO: 5220 - RNA, 17 nt, Artificial Sequence
  Sythetic
agaccaccuuuucagcc

SEQ ID NO: 5221 - RNA, 17 nt, Artificial Sequence
  Sythetic
ugagaacacugugcaca

SEQ ID NO: 5222 - RNA, 17 nt, Artificial Sequence
  Sythetic
aaacagaugaaugucca

SEQ ID NO: 5223 - RNA, 17 nt, Artificial Sequence
  Sythetic
uguucucaaacucacac

SEQ ID NO: 5224 - RNA, 17 nt, Artificial Sequence
  Sythetic
cuguggucuugagggcc

SEQ ID NO: 5225 - RNA, 17 nt, Artificial Sequence
  Sythetic
auuuccaucaccgaggc

SEQ ID NO: 5226 - RNA, 17 nt, Artificial Sequence
  Sythetic
accacagucauccucau

SEQ ID NO: 5227 - RNA, 17 nt, Artificial Sequence
  Sythetic
ugucugaaccccauccu

SEQ ID NO: 5228 - RNA, 17 nt, Artificial Sequence
  Sythetic
aaacucacacccuugcu

SEQ ID NO: 5229 - RNA, 17 nt, Artificial Sequence
  Sythetic
augacagauauaucugu

SEQ ID NO: 5230 - RNA, 17 nt, Artificial Sequence
  Sythetic
gguggcccuuggagugu

SEQ ID NO: 5231 - RNA, 20 nt, Artificial Sequence
  Sythetic
guuugagaacacugugcaca

SEQ ID NO: 5232 - RNA, 20 nt, Artificial Sequence
  Sythetic
uggaaacagaugaaugucca

SEQ ID NO: 5233 - RNA, 20 nt, Artificial Sequence
  Sythetic
caguguucucaaacucacac

SEQ ID NO: 5234 - RNA, 20 nt, Artificial Sequence
  Sythetic
ugacuguggucuugagggcc

SEQ ID NO: 5235 - RNA, 20 nt, Artificial Sequence
  Sythetic
uggauuuccaucaccgaggc

SEQ ID NO: 5236 - RNA, 20 nt, Artificial Sequence
  Sythetic
aagaccacagucauccucau

SEQ ID NO: 5237 - RNA, 20 nt, Artificial Sequence
  Sythetic
uguugucugaaccccauccu

SEQ ID NO: 5238 - RNA, 20 nt, Artificial Sequence
  Sythetic
cucaaacucacacccuugcu

SEQ ID NO: 5239 - RNA, 20 nt, Artificial Sequence
  Sythetic
cagaugacagauauaucugu

SEQ ID NO: 5240 - RNA, 20 nt, Artificial Sequence
  Sythetic
ucugguggcccuuggagugu

SEQ ID NO: 5241 - RNA, 17 nt, Artificial Sequence
  Sythetic
uacccguacuccaaaaa

SEQ ID NO: 5242 - RNA, 17 nt, Artificial Sequence
  Sythetic
cgcgcggcgggacucaa

SEQ ID NO: 5243 - RNA, 17 nt, Artificial Sequence
  Sythetic
gcgcgcggcgggacuca

SEQ ID NO: 5244 - RNA, 17 nt, Artificial Sequence
  Sythetic
uucugcccgcucggaga

SEQ ID NO: 5245 - RNA, 17 nt, Artificial Sequence
  Sythetic
uagcaaagugacgccga

SEQ ID NO: 5246 - RNA, 17 nt, Artificial Sequence
  Sythetic
cggcaaugcuggaagua

SEQ ID NO: 5247 - RNA, 17 nt, Artificial Sequence
  Sythetic
cucgggacucagaccac

SEQ ID NO: 5248 - RNA, 17 nt, Artificial Sequence
  Sythetic
gggaugcgccugaagac

SEQ ID NO: 5249 - RNA, 17 nt, Artificial Sequence
  Sythetic
ugaguccggagccggac

SEQ ID NO: 5250 - RNA, 17 nt, Artificial Sequence
  Sythetic
cgcggcuugggaagccc

SEQ ID NO: 5251 - RNA, 17 nt, Artificial Sequence
  Sythetic
gaccacccgcaaacagc

SEQ ID NO: 5252 - RNA, 17 nt, Artificial Sequence
  Sythetic
gguagugaguccggagc

SEQ ID NO: 5253 - RNA, 17 nt, Artificial Sequence
  Sythetic
gcgucugcugaaagcgc

SEQ ID NO: 5254 - RNA, 17 nt, Artificial Sequence
  Sythetic
aaguuucuggccgcggc

SEQ ID NO: 5255 - RNA, 17 nt, Artificial Sequence
  Sythetic
ccaguaggcggcaaugc

SEQ ID NO: 5256 - RNA, 17 nt, Artificial Sequence
  Sythetic
ccaugccuauauagugc

SEQ ID NO: 5257 - RNA, 17 nt, Artificial Sequence
  Sythetic
gagguccuguccggcuc

SEQ ID NO: 5258 - RNA, 17 nt, Artificial Sequence
  Sythetic
guggucgguagugaguc

SEQ ID NO: 5259 - RNA, 17 nt, Artificial Sequence
  Sythetic
gcagacgcagcccauuc

SEQ ID NO: 5260 - RNA, 17 nt, Artificial Sequence
  Sythetic
gcgcggcgggacucaag

SEQ ID NO: 5261 - RNA, 17 nt, Artificial Sequence
  Sythetic
cuccgagcgggcagaag

SEQ ID NO: 5262 - RNA, 17 nt, Artificial Sequence
  Sythetic
cgcaucuggagaaccag

SEQ ID NO: 5263 - RNA, 17 nt, Artificial Sequence
  Sythetic
guagcaaagugacgccg

SEQ ID NO: 5264 - RNA, 17 nt, Artificial Sequence
  Sythetic
uuauaaaaguccggccg

SEQ ID NO: 5265 - RNA, 17 nt, Artificial Sequence
  Sythetic
acugaaguuucuggccg

SEQ ID NO: 5266 - RNA, 17 nt, Artificial Sequence
  Sythetic
ugcgucugcugaaagcg

SEQ ID NO: 5267 - RNA, 17 nt, Artificial Sequence
  Sythetic
aaaacacgcuccgagcg

SEQ ID NO: 5268 - RNA, 17 nt, Artificial Sequence
  Sythetic
cgucugcugaaagcgcg

SEQ ID NO: 5269 - RNA, 17 nt, Artificial Sequence
  Sythetic
uugagucccgccgcgcg

SEQ ID NO: 5270 - RNA, 17 nt, Artificial Sequence
  Sythetic
gugcaagccgccgcgcg

SEQ ID NO: 5271 - RNA, 17 nt, Artificial Sequence
  Sythetic
caugcgccgcuggggcg

SEQ ID NO: 5272 - RNA, 17 nt, Artificial Sequence
  Sythetic
cgcggcgggacucaagg

SEQ ID NO: 5273 - RNA, 17 nt, Artificial Sequence
  Sythetic
ugguucuccagaugcgg

SEQ ID NO: 5274 - RNA, 17 nt, Artificial Sequence
  Sythetic
aaagauccuuccuucgg

SEQ ID NO: 5275 - RNA, 17 nt, Artificial Sequence
  Sythetic
ugccuauauagugcggg

SEQ ID NO: 5276 - RNA, 17 nt, Artificial Sequence
  Sythetic
acccugcuguuugcggg

SEQ ID NO: 5277 - RNA, 17 nt, Artificial Sequence
  Sythetic
cgcaugcgccgcugggg

SEQ ID NO: 5278 - RNA, 17 nt, Artificial Sequence
  Sythetic
uauauagugcggguggg

SEQ ID NO: 5279 - RNA, 17 nt, Artificial Sequence
  Sythetic
aggaacgcgucucucug

SEQ ID NO: 5280 - RNA, 17 nt, Artificial Sequence
  Sythetic
accaccggucucuuccu

SEQ ID NO: 5281 - RNA, 17 nt, Artificial Sequence
  Sythetic
ggccgcuucugcccgcu

SEQ ID NO: 5282 - RNA, 17 nt, Artificial Sequence
  Sythetic
gcggcgcaugcgccgcu

SEQ ID NO: 5283 - RNA, 17 nt, Artificial Sequence
  Sythetic
gccuauauagugcgggu

SEQ ID NO: 5284 - RNA, 17 nt, Artificial Sequence
  Sythetic
auauagugcgggugggu

SEQ ID NO: 5285 - RNA, 20 nt, Artificial Sequence
  Sythetic
gguacccguacuccaaaaaa

SEQ ID NO: 5286 - RNA, 20 nt, Artificial Sequence
  Sythetic
agguacccguacuccaaaaa

SEQ ID NO: 5287 - RNA, 20 nt, Artificial Sequence
  Sythetic
ccgcgcgcggcgggacucaa

SEQ ID NO: 5288 - RNA, 20 nt, Artificial Sequence
  Sythetic
uccaaaaaagggucaccgaa

SEQ ID NO: 5289 - RNA, 20 nt, Artificial Sequence
  Sythetic
ugcgcggcuugggaagccca

SEQ ID NO: 5290 - RNA, 20 nt, Artificial Sequence
  Sythetic
ccacccgcacuauauaggca

SEQ ID NO: 5291 - RNA, 20 nt, Artificial Sequence
  Sythetic
gccgcgcgcggcgggacuca

SEQ ID NO: 5292 - RNA, 20 nt, Artificial Sequence
  Sythetic
cgcuucugcccgcucggaga

SEQ ID NO: 5293 - RNA, 20 nt, Artificial Sequence
  Sythetic
agguagcaaagugacgccga

SEQ ID NO: 5294 - RNA, 20 nt, Artificial Sequence
  Sythetic
augcgccgcuggggcgggga

SEQ ID NO: 5295 - RNA, 20 nt, Artificial Sequence
  Sythetic
gaaccagcgguuaccaugga

SEQ ID NO: 5296 - RNA, 20 nt, Artificial Sequence
  Sythetic
uccauccuugcuaaagugga

SEQ ID NO: 5297 - RNA, 20 nt, Artificial Sequence
  Sythetic
ugccucgggacucagaccac

SEQ ID NO: 5298 - RNA, 20 nt, Artificial Sequence
  Sythetic
agcgggaugcgccugaagac

SEQ ID NO: 5299 - RNA, 20 nt, Artificial Sequence
  Sythetic
gugagucgaggagaaacgac

SEQ ID NO: 5300 - RNA, 20 nt, Artificial Sequence
  Sythetic
uagugaguccggagccggac

SEQ ID NO: 5301 - RNA, 20 nt, Artificial Sequence
  Sythetic
ucuccagaugcgguggcuac

SEQ ID NO: 5302 - RNA, 20 nt, Artificial Sequence
  Sythetic
aguggauggaauuccagacc

SEQ ID NO: 5303 - RNA, 20 nt, Artificial Sequence
  Sythetic
gugcgcggcuugggaagccc

SEQ ID NO: 5304 - RNA, 20 nt, Artificial Sequence
  Sythetic
gucucuacuguagcauuccc

SEQ ID NO: 5305 - RNA, 20 nt, Artificial Sequence
  Sythetic
accgaccacccgcaaacagc

SEQ ID NO: 5306 - RNA, 20 nt, Artificial Sequence
  Sythetic
aguuuguuggcugcggcagc

SEQ ID NO: 5307 - RNA, 20 nt, Artificial Sequence
  Sythetic
auccccuccaugguaaccgc

SEQ ID NO: 5308 - RNA, 20 nt, Artificial Sequence
  Sythetic
gcugcgucugcugaaagcgc

SEQ ID NO: 5309 - RNA, 20 nt, Artificial Sequence
  Sythetic
ugcaagccgccgcgcgcggc

SEQ ID NO: 5310 - RNA, 20 nt, Artificial Sequence
  Sythetic
ggcgcaugcgccgcuggggc

SEQ ID NO: 5311 - RNA, 20 nt, Artificial Sequence
  Sythetic
ugaccaugccuauauagugc

SEQ ID NO: 5312 - RNA, 20 nt, Artificial Sequence
  Sythetic
ugggagguccuguccggcuc

SEQ ID NO: 5313 - RNA, 20 nt, Artificial Sequence
  Sythetic
cggguggucgguagugaguc

SEQ ID NO: 5314 - RNA, 20 nt, Artificial Sequence
  Sythetic
ucagcagacgcagcccauuc

SEQ ID NO: 5315 - RNA, 20 nt, Artificial Sequence
  Sythetic
cgcgcuucccaccugucuuc

SEQ ID NO: 5316 - RNA, 20 nt, Artificial Sequence
  Sythetic
ccucuccgagcgggcagaag

SEQ ID NO: 5317 - RNA, 20 nt, Artificial Sequence
  Sythetic
caccgcaucuggagaaccag

SEQ ID NO: 5318 - RNA, 20 nt, Artificial Sequence
  Sythetic
gcgcggcuugggaagcccag

SEQ ID NO: 5319 - RNA, 20 nt, Artificial Sequence
  Sythetic
agccggacaggaccucccag

SEQ ID NO: 5320 - RNA, 20 nt, Artificial Sequence
  Sythetic
gagcgcagccccucuccgag

SEQ ID NO: 5321 - RNA, 20 nt, Artificial Sequence
  Sythetic
gaccgguggucugagucccg

SEQ ID NO: 5322 - RNA, 20 nt, Artificial Sequence
  Sythetic
cagguagcaaagugacgccg

SEQ ID NO: 5323 - RNA, 20 nt, Artificial Sequence
  Sythetic
ggcugcgucugcugaaagcg

SEQ ID NO: 5324 - RNA, 20 nt, Artificial Sequence
  Sythetic
auaaaaacacgcuccgagcg

SEQ ID NO: 5325 - RNA, 20 nt, Artificial Sequence
  Sythetic
cugcgucugcugaaagcgcg

SEQ ID NO: 5326 - RNA, 20 nt, Artificial Sequence
  Sythetic
cccuugagucccgccgcgcg

SEQ ID NO: 5327 - RNA, 20 nt, Artificial Sequence
  Sythetic
agcgugcaagccgccgcgcg

SEQ ID NO: 5328 - RNA, 20 nt, Artificial Sequence
  Sythetic
gcagacgcagcccauucagg

SEQ ID NO: 5329 - RNA, 20 nt, Artificial Sequence
  Sythetic
ggaguaacccaaccaguagg

SEQ ID NO: 5330 - RNA, 20 nt, Artificial Sequence
  Sythetic
gugcaagccgccgcgcgcgg

SEQ ID NO: 5331 - RNA, 20 nt, Artificial Sequence
  Sythetic
cgcugguucuccagaugcgg

SEQ ID NO: 5332 - RNA, 20 nt, Artificial Sequence
  Sythetic
aguaaagauccuuccuucgg

SEQ ID NO: 5333 - RNA, 20 nt, Artificial Sequence
  Sythetic
ccaugccuauauagugcggg

SEQ ID NO: 5334 - RNA, 20 nt, Artificial Sequence
  Sythetic
cggcgcaugcgccgcugggg

SEQ ID NO: 5335 - RNA, 20 nt, Artificial Sequence
  Sythetic
agaaccagcgguuaccaugg

SEQ ID NO: 5336 - RNA, 20 nt, Artificial Sequence
  Sythetic
aaccgcugguucuccagaug

SEQ ID NO: 5337 - RNA, 20 nt, Artificial Sequence
  Sythetic
cuauauagugcgggugggug

SEQ ID NO: 5338 - RNA, 20 nt, Artificial Sequence
  Sythetic
gaccaccggucucuuccuug

SEQ ID NO: 5339 - RNA, 20 nt, Artificial Sequence
  Sythetic
agaaggcgugcgcgcugccu

SEQ ID NO: 5340 - RNA, 20 nt, Artificial Sequence
  Sythetic
cagaccaccggucucuuccu

SEQ ID NO: 5341 - RNA, 20 nt, Artificial Sequence
  Sythetic
ggggaauggcguuggaagcu

SEQ ID NO: 5342 - RNA, 20 nt, Artificial Sequence
  Sythetic
agcgcggcgcaugcgccgcu

SEQ ID NO: 5343 - RNA, 20 nt, Artificial Sequence
  Sythetic
acaggugggaagcgcgggcu

SEQ ID NO: 5344 - RNA, 20 nt, Artificial Sequence
  Sythetic
uaggcggcaaugcuggaagu

SEQ ID NO: 5345 - RNA, 20 nt, Artificial Sequence
  Sythetic
gcuggaguaacccaaccagu

SEQ ID NO: 5346 - RNA, 20 nt, Artificial Sequence
  Sythetic
gaaagcgcggggaauggcgu

SEQ ID NO: 5347 - RNA, 20 nt, Artificial Sequence
  Sythetic
caugccuauauagugcgggu

SEQ ID NO: 5348 - RNA, 20 nt, Artificial Sequence
  Sythetic
agcauugccgccuacugguu

SEQ ID NO: 5349 - RNA, 20 nt, Artificial Sequence
  Sythetic
uccuuucggugacccuuuuu

SEQ ID NO: 5350 - RNA, 17 nt, Artificial Sequence
  Sythetic
acccguacuccaaaaaa

SEQ ID NO: 5351 - RNA, 17 nt, Artificial Sequence
  Sythetic
cccauucaggagguaaa

SEQ ID NO: 5352 - RNA, 17 nt, Artificial Sequence
  Sythetic
aaaaaagggucaccgaa

SEQ ID NO: 5353 - RNA, 17 nt, Artificial Sequence
  Sythetic
cacugaggcccagggaa

SEQ ID NO: 5354 - RNA, 17 nt, Artificial Sequence
  Sythetic
gcugaaagcgcggggaa

SEQ ID NO: 5355 - RNA, 17 nt, Artificial Sequence
  Sythetic
uccuuuuaccuccugaa

SEQ ID NO: 5356 - RNA, 17 nt, Artificial Sequence
  Sythetic
agaaccagcgguuacca

SEQ ID NO: 5357 - RNA, 17 nt, Artificial Sequence
  Sythetic
gcggcuugggaagccca

SEQ ID NO: 5358 - RNA, 17 nt, Artificial Sequence
  Sythetic
agagacacugaggccca

SEQ ID NO: 5359 - RNA, 17 nt, Artificial Sequence
  Sythetic
uacacugauccccucca

SEQ ID NO: 5360 - RNA, 17 nt, Artificial Sequence
  Sythetic
accacccgcaaacagca

SEQ ID NO: 5361 - RNA, 17 nt, Artificial Sequence
  Sythetic
uuccauccacuuuagca

SEQ ID NO: 5362 - RNA, 17 nt, Artificial Sequence
  Sythetic
cgaggaaggagggcgca

SEQ ID NO: 5363 - RNA, 17 nt, Artificial Sequence
  Sythetic
cccgcacuauauaggca

SEQ ID NO: 5364 - RNA, 17 nt, Artificial Sequence
  Sythetic
gugcacaagugcagaga

SEQ ID NO: 5365 - RNA, 17 nt, Artificial Sequence
  Sythetic
uggggcggggagggaga

SEQ ID NO: 5366 - RNA, 17 nt, Artificial Sequence
  Sythetic
aggcggggugggggaga

SEQ ID NO: 5367 - RNA, 17 nt, Artificial Sequence
  Sythetic
auccacuuuagcaagga

SEQ ID NO: 5368 - RNA, 17 nt, Artificial Sequence
  Sythetic
gcagacgcgaggaagga

SEQ ID NO: 5369 - RNA, 17 nt, Artificial Sequence
  Sythetic
aggggcagacgcgagga

SEQ ID NO: 5370 - RNA, 17 nt, Artificial Sequence
  Sythetic
acacugaggcccaggga

SEQ ID NO: 5371 - RNA, 17 nt, Artificial Sequence
  Sythetic
cgccgcuggggcgggga

SEQ ID NO: 5372 - RNA, 17 nt, Artificial Sequence
  Sythetic
ccagcgguuaccaugga

SEQ ID NO: 5373 - RNA, 17 nt, Artificial Sequence
  Sythetic
auccuugcuaaagugga

SEQ ID NO: 5374 - RNA, 17 nt, Artificial Sequence
  Sythetic
gcauuuccuaaguuuga

SEQ ID NO: 5375 - RNA, 17 nt, Artificial Sequence
  Sythetic
gacccuuuuuuggagua

SEQ ID NO: 5376 - RNA, 17 nt, Artificial Sequence
  Sythetic
acaaagcagguugaaac

SEQ ID NO: 5377 - RNA, 17 nt, Artificial Sequence
  Sythetic
gagacacaugcagccac

SEQ ID NO: 5378 - RNA, 17 nt, Artificial Sequence
  Sythetic
agucgaggagaaacgac

SEQ ID NO: 5379 - RNA, 17 nt, Artificial Sequence
  Sythetic
ccagcauugccgccuac

SEQ ID NO: 5380 - RNA, 17 nt, Artificial Sequence
  Sythetic
ccagaugcgguggcuac

SEQ ID NO: 5381 - RNA, 17 nt, Artificial Sequence
  Sythetic
acccuuuuuuggaguac

SEQ ID NO: 5382 - RNA, 17 nt, Artificial Sequence
  Sythetic
ggauggaauuccagacc

SEQ ID NO: 5383 - RNA, 17 nt, Artificial Sequence
  Sythetic
caaacagcagggucccc

SEQ ID NO: 5384 - RNA, 17 nt, Artificial Sequence
  Sythetic
uagagacacugaggccc

SEQ ID NO: 5385 - RNA, 17 nt, Artificial Sequence
  Sythetic
ucuacuguagcauuccc

SEQ ID NO: 5386 - RNA, 17 nt, Artificial Sequence
  Sythetic
aagucacuccccuuccc

SEQ ID NO: 5387 - RNA, 17 nt, Artificial Sequence
  Sythetic
agcgggcagaagcggcc

SEQ ID NO: 5388 - RNA, 17 nt, Artificial Sequence
  Sythetic
ggguaccuccaaugucc

SEQ ID NO: 5389 - RNA, 17 nt, Artificial Sequence
  Sythetic
uacauuuaugacaaagc

SEQ ID NO: 5390 - RNA, 17 nt, Artificial Sequence
  Sythetic
cuaaguuugagggaagc

SEQ ID NO: 5391 - RNA, 17 nt, Artificial Sequence
  Sythetic
uuguuggcugcggcagc

SEQ ID NO: 5392 - RNA, 17 nt, Artificial Sequence
  Sythetic
gcagccccucuccgagc

SEQ ID NO: 5393 - RNA, 17 nt, Artificial Sequence
  Sythetic
guggguggggggggagc

SEQ ID NO: 5394 - RNA, 17 nt, Artificial Sequence
  Sythetic
cccuccaugguaaccgc

SEQ ID NO: 5395 - RNA, 17 nt, Artificial Sequence
  Sythetic
cgcggcgcaugcgccgc

SEQ ID NO: 5396 - RNA, 17 nt, Artificial Sequence
  Sythetic
agacaggugggaagcgc

SEQ ID NO: 5397 - RNA, 17 nt, Artificial Sequence
  Sythetic
gcgaggaaggagggcgc

SEQ ID NO: 5398 - RNA, 17 nt, Artificial Sequence
  Sythetic
gcggggagggagaaggc

SEQ ID NO: 5399 - RNA, 17 nt, Artificial Sequence
  Sythetic
aagccgccgcgcgcggc

SEQ ID NO: 5400 - RNA, 17 nt, Artificial Sequence
  Sythetic
aaggagggcgcaggggc

SEQ ID NO: 5401 - RNA, 17 nt, Artificial Sequence
  Sythetic
gcaugcgccgcuggggc

SEQ ID NO: 5402 - RNA, 17 nt, Artificial Sequence
  Sythetic
gaaggggagugacuugc

SEQ ID NO: 5403 - RNA, 17 nt, Artificial Sequence
  Sythetic
gggacccugcuguuugc

SEQ ID NO: 5404 - RNA, 17 nt, Artificial Sequence
  Sythetic
ccaguagccaccgcauc

SEQ ID NO: 5405 - RNA, 17 nt, Artificial Sequence
  Sythetic
uggcuacuggagcacuc

SEQ ID NO: 5406 - RNA, 17 nt, Artificial Sequence
  Sythetic
aacuuaggaaaugccuc

SEQ ID NO: 5407 - RNA, 17 nt, Artificial Sequence
  Sythetic
ggcgugcgcgcugccuc

SEQ ID NO: 5408 - RNA, 17 nt, Artificial Sequence
  Sythetic
guguuuuuauaaaaguc

SEQ ID NO: 5409 - RNA, 17 nt, Artificial Sequence
  Sythetic
uguagcauucccagguc

SEQ ID NO: 5410 - RNA, 17 nt, Artificial Sequence
  Sythetic
cucugggagguccuguc

SEQ ID NO: 5411 - RNA, 17 nt, Artificial Sequence
  Sythetic
gcuucccaccugucuuc

SEQ ID NO: 5412 - RNA, 17 nt, Artificial Sequence
  Sythetic
caacaaacugaaguuuc

SEQ ID NO: 5413 - RNA, 17 nt, Artificial Sequence
  Sythetic
guccauccuugcuaaag

SEQ ID NO: 5414 - RNA, 17 nt, Artificial Sequence
  Sythetic
acugaggcccagggaag

SEQ ID NO: 5415 - RNA, 17 nt, Artificial Sequence
  Sythetic
ccuaaguuugagggaag

SEQ ID NO: 5416 - RNA, 17 nt, Artificial Sequence
  Sythetic
cucccuccccgccccag

SEQ ID NO: 5417 - RNA, 17 nt, Artificial Sequence
  Sythetic
cggcuugggaagcccag

SEQ ID NO: 5418 - RNA, 17 nt, Artificial Sequence
  Sythetic
cggacaggaccucccag

SEQ ID NO: 5419 - RNA, 17 nt, Artificial Sequence
  Sythetic
uggaaagagcguuccag

SEQ ID NO: 5420 - RNA, 17 nt, Artificial Sequence
  Sythetic
gaggaaggagggcgcag

SEQ ID NO: 5421 - RNA, 17 nt, Artificial Sequence
  Sythetic
ucugcccgcucggagag

SEQ ID NO: 5422 - RNA, 17 nt, Artificial Sequence
  Sythetic
ggcggggugggggagag

SEQ ID NO: 5423 - RNA, 17 nt, Artificial Sequence
  Sythetic
cgcagccccucuccgag

SEQ ID NO: 5424 - RNA, 17 nt, Artificial Sequence
  Sythetic
gcaggggcggggcggag

SEQ ID NO: 5425 - RNA, 17 nt, Artificial Sequence
  Sythetic
cuucugcccgcucggag

SEQ ID NO: 5426 - RNA, 17 nt, Artificial Sequence
  Sythetic
aaggcggggugggggag

SEQ ID NO: 5427 - RNA, 17 nt, Artificial Sequence
  Sythetic
cagcgguuaccauggag

SEQ ID NO: 5428 - RNA, 17 nt, Artificial Sequence
  Sythetic
cgguggucugagucccg

SEQ ID NO: 5429 - RNA, 17 nt, Artificial Sequence
  Sythetic
aagacaggugggaagcg

SEQ ID NO: 5430 - RNA, 17 nt, Artificial Sequence
  Sythetic
ggagaggggcagacgcg

SEQ ID NO: 5431 - RNA, 17 nt, Artificial Sequence
  Sythetic
cggggagggagaaggcg

SEQ ID NO: 5432 - RNA, 17 nt, Artificial Sequence
  Sythetic
aggagggcgcaggggcg

SEQ ID NO: 5433 - RNA, 17 nt, Artificial Sequence
  Sythetic
cggggcggagaggugcg

SEQ ID NO: 5434 - RNA, 17 nt, Artificial Sequence
  Sythetic
uuuuucucugugagucg

SEQ ID NO: 5435 - RNA, 17 nt, Artificial Sequence
  Sythetic
ggcggggagggagaagg

SEQ ID NO: 5436 - RNA, 17 nt, Artificial Sequence
  Sythetic
ggcagacgcgaggaagg

SEQ ID NO: 5437 - RNA, 17 nt, Artificial Sequence
  Sythetic
augcgccugaagacagg

SEQ ID NO: 5438 - RNA, 17 nt, Artificial Sequence
  Sythetic
gacgcagcccauucagg

SEQ ID NO: 5439 - RNA, 17 nt, Artificial Sequence
  Sythetic
guaacccaaccaguagg

SEQ ID NO: 5440 - RNA, 17 nt, Artificial Sequence
  Sythetic
cccaaggaagagaccgg

SEQ ID NO: 5441 - RNA, 17 nt, Artificial Sequence
  Sythetic
agucccgccgcgcgcgg

SEQ ID NO: 5442 - RNA, 17 nt, Artificial Sequence
  Sythetic
caagccgccgcgcgcgg

SEQ ID NO: 5443 - RNA, 17 nt, Artificial Sequence
  Sythetic
gaaggagggcgcagggg

SEQ ID NO: 5444 - RNA, 17 nt, Artificial Sequence
  Sythetic
ggagggagaaggcgggg

SEQ ID NO: 5445 - RNA, 17 nt, Artificial Sequence
  Sythetic
agggcgcaggggcgggg

SEQ ID NO: 5446 - RNA, 17 nt, Artificial Sequence
  Sythetic
gcgccgcuggggcgggg

SEQ ID NO: 5447 - RNA, 17 nt, Artificial Sequence
  Sythetic
gugcggguggguggggg

SEQ ID NO: 5448 - RNA, 17 nt, Artificial Sequence
  Sythetic
agugcgggugggugggg

SEQ ID NO: 5449 - RNA, 17 nt, Artificial Sequence
  Sythetic
uaggaaaugccucuggg

SEQ ID NO: 5450 - RNA, 17 nt, Artificial Sequence
  Sythetic
uagugcggguggguggg

SEQ ID NO: 5451 - RNA, 17 nt, Artificial Sequence
  Sythetic
accagcgguuaccaugg

SEQ ID NO: 5452 - RNA, 17 nt, Artificial Sequence
  Sythetic
gggagaaggcggggugg

SEQ ID NO: 5453 - RNA, 17 nt, Artificial Sequence
  Sythetic
auagugcgggugggugg

SEQ ID NO: 5454 - RNA, 17 nt, Artificial Sequence
  Sythetic
agcggccaggacauugg

SEQ ID NO: 5455 - RNA, 17 nt, Artificial Sequence
  Sythetic
cgcugguucuccagaug

SEQ ID NO: 5456 - RNA, 17 nt, Artificial Sequence
  Sythetic
cuacaguagagacacug

SEQ ID NO: 5457 - RNA, 17 nt, Artificial Sequence
  Sythetic
cggcgcaugcgccgcug

SEQ ID NO: 5458 - RNA, 17 nt, Artificial Sequence
  Sythetic
cuucaguuuguuggcug

SEQ ID NO: 5459 - RNA, 17 nt, Artificial Sequence
  Sythetic
accaugccuauauagug

SEQ ID NO: 5460 - RNA, 17 nt, Artificial Sequence
  Sythetic
agggagaaggcggggug

SEQ ID NO: 5461 - RNA, 17 nt, Artificial Sequence
  Sythetic
uauagugcgggugggug

SEQ ID NO: 5462 - RNA, 17 nt, Artificial Sequence
  Sythetic
caccggucucuuccuug

SEQ ID NO: 5463 - RNA, 17 nt, Artificial Sequence
  Sythetic
ggcauuuccuaaguuug

SEQ ID NO: 5464 - RNA, 17 nt, Artificial Sequence
  Sythetic
ggggacccugcuguuug

SEQ ID NO: 5465 - RNA, 17 nt, Artificial Sequence
  Sythetic
ccuuuuaccuccugaau

SEQ ID NO: 5466 - RNA, 17 nt, Artificial Sequence
  Sythetic
agaagcggccaggacau

SEQ ID NO: 5467 - RNA, 17 nt, Artificial Sequence
  Sythetic
uggggggggagcaggau

SEQ ID NO: 5468 - RNA, 17 nt, Artificial Sequence
  Sythetic
acccacccgcacuauau

SEQ ID NO: 5469 - RNA, 17 nt, Artificial Sequence
  Sythetic
gauggaauuccagaccu

SEQ ID NO: 5470 - RNA, 17 nt, Artificial Sequence
  Sythetic
aaacagcaggguccccu

SEQ ID NO: 5471 - RNA, 17 nt, Artificial Sequence
  Sythetic
uggagcacucaggcccu

SEQ ID NO: 5472 - RNA, 17 nt, Artificial Sequence
  Sythetic
agucacuccccuucccu

SEQ ID NO: 5473 - RNA, 17 nt, Artificial Sequence
  Sythetic
aggcgugcgcgcugccu

SEQ ID NO: 5474 - RNA, 17 nt, Artificial Sequence
  Sythetic
gaauggcguuggaagcu

SEQ ID NO: 5475 - RNA, 17 nt, Artificial Sequence
  Sythetic
ggcgcaugcgccgcgcu

SEQ ID NO: 5476 - RNA, 17 nt, Artificial Sequence
  Sythetic
cggagaggugcgcggcu

SEQ ID NO: 5477 - RNA, 17 nt, Artificial Sequence
  Sythetic
ggugggaagcgcgggcu

SEQ ID NO: 5478 - RNA, 17 nt, Artificial Sequence
  Sythetic
acuuaggaaaugccucu

SEQ ID NO: 5479 - RNA, 17 nt, Artificial Sequence
  Sythetic
gcggcaaugcuggaagu

SEQ ID NO: 5480 - RNA, 17 nt, Artificial Sequence
  Sythetic
ggaguaacccaaccagu

SEQ ID NO: 5481 - RNA, 17 nt, Artificial Sequence
  Sythetic
agcgcggggaauggcgu

SEQ ID NO: 5482 - RNA, 17 nt, Artificial Sequence
  Sythetic
ugcgccugaagacaggu

SEQ ID NO: 5483 - RNA, 17 nt, Artificial Sequence
  Sythetic
gagggagaaggcggggu

SEQ ID NO: 5484 - RNA, 17 nt, Artificial Sequence
  Sythetic
cauugccgccuacuggu

SEQ ID NO: 5485 - RNA, 17 nt, Artificial Sequence
  Sythetic
ugcuguuugcggguggu

SEQ ID NO: 5486 - RNA, 17 nt, Artificial Sequence
  Sythetic
cagaaacuucaguuugu

SEQ ID NO: 5487 - RNA, 17 nt, Artificial Sequence
  Sythetic
ccgcuucccucaaacuu

SEQ ID NO: 5488 - RNA, 17 nt, Artificial Sequence
  Sythetic
aguaaagauccuuccuu

SEQ ID NO: 5489 - RNA, 17 nt, Artificial Sequence
  Sythetic
ccaccggucucuuccuu

SEQ ID NO: 5490 - RNA, 17 nt, Artificial Sequence
  Sythetic
ggagaggugcgcggcuu

SEQ ID NO: 5491 - RNA, 17 nt, Artificial Sequence
  Sythetic
auugccgccuacugguu

SEQ ID NO: 5492 - RNA, 17 nt, Artificial Sequence
  Sythetic
gucaagaaaacuccuuu

SEQ ID NO: 5493 - RNA, 17 nt, Artificial Sequence
  Sythetic
uuucggugacccuuuuu

SEQ ID NO: 5494 - RNA, 20 nt, Artificial Sequence
  Sythetic
cagcccauucaggagguaaa

SEQ ID NO: 5495 - RNA, 20 nt, Artificial Sequence
  Sythetic
agacacugaggcccagggaa

SEQ ID NO: 5496 - RNA, 20 nt, Artificial Sequence
  Sythetic
ucugcugaaagcgcggggaa

SEQ ID NO: 5497 - RNA, 20 nt, Artificial Sequence
  Sythetic
uacuccuuuuaccuccugaa

SEQ ID NO: 5498 - RNA, 20 nt, Artificial Sequence
  Sythetic
uggagaaccagcgguuacca

SEQ ID NO: 5499 - RNA, 20 nt, Artificial Sequence
  Sythetic
aguagagacacugaggccca

SEQ ID NO: 5500 - RNA, 20 nt, Artificial Sequence
  Sythetic
acuuacacugauccccucca

SEQ ID NO: 5501 - RNA, 20 nt, Artificial Sequence
  Sythetic
ccgaccacccgcaaacagca

SEQ ID NO: 5502 - RNA, 20 nt, Artificial Sequence
  Sythetic
gaauuccauccacuuuagca

SEQ ID NO: 5503 - RNA, 20 nt, Artificial Sequence
  Sythetic
acgcgaggaaggagggcgca

SEQ ID NO: 5504 - RNA, 20 nt, Artificial Sequence
  Sythetic
ucugugcacaagugcagaga

SEQ ID NO: 5505 - RNA, 20 nt, Artificial Sequence
  Sythetic
cgcuggggcggggagggaga

SEQ ID NO: 5506 - RNA, 20 nt, Artificial Sequence
  Sythetic
agaaggcggggugggggaga

SEQ ID NO: 5507 - RNA, 20 nt, Artificial Sequence
  Sythetic
uccauccacuuuagcaagga

SEQ ID NO: 5508 - RNA, 20 nt, Artificial Sequence
  Sythetic
ggggcagacgcgaggaagga

SEQ ID NO: 5509 - RNA, 20 nt, Artificial Sequence
  Sythetic
gagaggggcagacgcgagga

SEQ ID NO: 5510 - RNA, 20 nt, Artificial Sequence
  Sythetic
gagacacugaggcccaggga

SEQ ID NO: 5511 - RNA, 20 nt, Artificial Sequence
  Sythetic
gaggcauuuccuaaguuuga

SEQ ID NO: 5512 - RNA, 20 nt, Artificial Sequence
  Sythetic
aggcggcaaugcuggaagua

SEQ ID NO: 5513 - RNA, 20 nt, Artificial Sequence
  Sythetic
ggugacccuuuuuuggagua

SEQ ID NO: 5514 - RNA, 20 nt, Artificial Sequence
  Sythetic
augacaaagcagguugaaac

SEQ ID NO: 5515 - RNA, 20 nt, Artificial Sequence
  Sythetic
ggggagacacaugcagccac

SEQ ID NO: 5516 - RNA, 20 nt, Artificial Sequence
  Sythetic
cuuccagcauugccgccuac

SEQ ID NO: 5517 - RNA, 20 nt, Artificial Sequence
  Sythetic
gugacccuuuuuuggaguac

SEQ ID NO: 5518 - RNA, 20 nt, Artificial Sequence
  Sythetic
ccgcaaacagcagggucccc

SEQ ID NO: 5519 - RNA, 20 nt, Artificial Sequence
  Sythetic
caguagagacacugaggccc

SEQ ID NO: 5520 - RNA, 20 nt, Artificial Sequence
  Sythetic
agcaagucacuccccuuccc

SEQ ID NO: 5521 - RNA, 20 nt, Artificial Sequence
  Sythetic
ccgagcgggcagaagcggcc

SEQ ID NO: 5522 - RNA, 20 nt, Artificial Sequence
  Sythetic
uacggguaccuccaaugucc

SEQ ID NO: 5523 - RNA, 20 nt, Artificial Sequence
  Sythetic
uuguacauuuaugacaaagc

SEQ ID NO: 5524 - RNA, 20 nt, Artificial Sequence
  Sythetic
uuccuaaguuugagggaagc

SEQ ID NO: 5525 - RNA, 20 nt, Artificial Sequence
  Sythetic
agcgcagccccucuccgagc

SEQ ID NO: 5526 - RNA, 20 nt, Artificial Sequence
  Sythetic
gucgguagugaguccggagc

SEQ ID NO: 5527 - RNA, 20 nt, Artificial Sequence
  Sythetic
cggguggguggggggggagc

SEQ ID NO: 5528 - RNA, 20 nt, Artificial Sequence
  Sythetic
gagcgcggcgcaugcgccgc

SEQ ID NO: 5529 - RNA, 20 nt, Artificial Sequence
  Sythetic
ugaagacaggugggaagcgc

SEQ ID NO: 5530 - RNA, 20 nt, Artificial Sequence
  Sythetic
gacgcgaggaaggagggcgc

SEQ ID NO: 5531 - RNA, 20 nt, Artificial Sequence
  Sythetic
ggggcggggagggagaaggc

SEQ ID NO: 5532 - RNA, 20 nt, Artificial Sequence
  Sythetic
cugaaguuucuggccgcggc

SEQ ID NO: 5533 - RNA, 20 nt, Artificial Sequence
  Sythetic
aggaaggagggcgcaggggc

SEQ ID NO: 5534 - RNA, 20 nt, Artificial Sequence
  Sythetic
caaccaguaggcggcaaugc

SEQ ID NO: 5535 - RNA, 20 nt, Artificial Sequence
  Sythetic
agggaaggggagugacuugc

SEQ ID NO: 5536 - RNA, 20 nt, Artificial Sequence
  Sythetic
caggggacccugcuguuugc

SEQ ID NO: 5537 - RNA, 20 nt, Artificial Sequence
  Sythetic
gcuccaguagccaccgcauc

SEQ ID NO: 5538 - RNA, 20 nt, Artificial Sequence
  Sythetic
cgguggcuacuggagcacuc

SEQ ID NO: 5539 - RNA, 20 nt, Artificial Sequence
  Sythetic
ucaaacuuaggaaaugccuc

SEQ ID NO: 5540 - RNA, 20 nt, Artificial Sequence
  Sythetic
gaaggcgugcgcgcugccuc

SEQ ID NO: 5541 - RNA, 20 nt, Artificial Sequence
  Sythetic
agcguguuuuuauaaaaguc

SEQ ID NO: 5542 - RNA, 20 nt, Artificial Sequence
  Sythetic
uacuguagcauucccagguc

SEQ ID NO: 5543 - RNA, 20 nt, Artificial Sequence
  Sythetic
ugccucugggagguccuguc

SEQ ID NO: 5544 - RNA, 20 nt, Artificial Sequence
  Sythetic
agccaacaaacugaaguuuc

SEQ ID NO: 5545 - RNA, 20 nt, Artificial Sequence
  Sythetic
cgcguccauccuugcuaaag

SEQ ID NO: 5546 - RNA, 20 nt, Artificial Sequence
  Sythetic
cgcgcgcggcgggacucaag

SEQ ID NO: 5547 - RNA, 20 nt, Artificial Sequence
  Sythetic
gacacugaggcccagggaag

SEQ ID NO: 5548 - RNA, 20 nt, Artificial Sequence
  Sythetic
uuuccuaaguuugagggaag

SEQ ID NO: 5549 - RNA, 20 nt, Artificial Sequence
  Sythetic
cuucucccuccccgccccag

SEQ ID NO: 5550 - RNA, 20 nt, Artificial Sequence
  Sythetic
gacuggaaagagcguuccag

SEQ ID NO: 5551 - RNA, 20 nt, Artificial Sequence
  Sythetic
cgcgaggaaggagggcgcag

SEQ ID NO: 5552 - RNA, 20 nt, Artificial Sequence
  Sythetic
gcuucugcccgcucggagag

SEQ ID NO: 5553 - RNA, 20 nt, Artificial Sequence
  Sythetic
gaaggcggggugggggagag

SEQ ID NO: 5554 - RNA, 20 nt, Artificial Sequence
  Sythetic
ggcgcaggggcggggcggag

SEQ ID NO: 5555 - RNA, 20 nt, Artificial Sequence
  Sythetic
ccgcuucugcccgcucggag

SEQ ID NO: 5556 - RNA, 20 nt, Artificial Sequence
  Sythetic
gagaaggcggggugggggag

SEQ ID NO: 5557 - RNA, 20 nt, Artificial Sequence
  Sythetic
aaccagcgguuaccauggag

SEQ ID NO: 5558 - RNA, 20 nt, Artificial Sequence
  Sythetic
uuuuuauaaaaguccggccg

SEQ ID NO: 5559 - RNA, 20 nt, Artificial Sequence
  Sythetic
caaacugaaguuucuggccg

SEQ ID NO: 5560 - RNA, 20 nt, Artificial Sequence
  Sythetic
cugaagacaggugggaagcg

SEQ ID NO: 5561 - RNA, 20 nt, Artificial Sequence
  Sythetic
gggggagaggggcagacgcg

SEQ ID NO: 5562 - RNA, 20 nt, Artificial Sequence
  Sythetic
gggcggggagggagaaggcg

SEQ ID NO: 5563 - RNA, 20 nt, Artificial Sequence
  Sythetic
ggaaggagggcgcaggggcg

SEQ ID NO: 5564 - RNA, 20 nt, Artificial Sequence
  Sythetic
gcgcaugcgccgcuggggcg

SEQ ID NO: 5565 - RNA, 20 nt, Artificial Sequence
  Sythetic
gggcggggcggagaggugcg

SEQ ID NO: 5566 - RNA, 20 nt, Artificial Sequence
  Sythetic
aucuuuuucucugugagucg

SEQ ID NO: 5567 - RNA, 20 nt, Artificial Sequence
  Sythetic
gcgcgcggcgggacucaagg

SEQ ID NO: 5568 - RNA, 20 nt, Artificial Sequence
  Sythetic
uggggcggggagggagaagg

SEQ ID NO: 5569 - RNA, 20 nt, Artificial Sequence
  Sythetic
aggggcagacgcgaggaagg

SEQ ID NO: 5570 - RNA, 20 nt, Artificial Sequence
  Sythetic
gggaugcgccugaagacagg

SEQ ID NO: 5571 - RNA, 20 nt, Artificial Sequence
  Sythetic
uugagucccgccgcgcgcgg

SEQ ID NO: 5572 - RNA, 20 nt, Artificial Sequence
  Sythetic
gggacccugcuguuugcggg

SEQ ID NO: 5573 - RNA, 20 nt, Artificial Sequence
  Sythetic
gaggaaggagggcgcagggg

SEQ ID NO: 5574 - RNA, 20 nt, Artificial Sequence
  Sythetic
cggggagggagaaggcgggg

SEQ ID NO: 5575 - RNA, 20 nt, Artificial Sequence
  Sythetic
aggagggcgcaggggcgggg

SEQ ID NO: 5576 - RNA, 20 nt, Artificial Sequence
  Sythetic
caugcgccgcuggggcgggg

SEQ ID NO: 5577 - RNA, 20 nt, Artificial Sequence
  Sythetic
auagugcggguggguggggg

SEQ ID NO: 5578 - RNA, 20 nt, Artificial Sequence
  Sythetic
uauagugcgggugggugggg

SEQ ID NO: 5579 - RNA, 20 nt, Artificial Sequence
  Sythetic
acuuaggaaaugccucuggg

SEQ ID NO: 5580 - RNA, 20 nt, Artificial Sequence
  Sythetic
gccuauauagugcggguggg

SEQ ID NO: 5581 - RNA, 20 nt, Artificial Sequence
  Sythetic
auauagugcggguggguggg

SEQ ID NO: 5582 - RNA, 20 nt, Artificial Sequence
  Sythetic
ggagggagaaggcggggugg

SEQ ID NO: 5583 - RNA, 20 nt, Artificial Sequence
  Sythetic
uauauagugcgggugggugg

SEQ ID NO: 5584 - RNA, 20 nt, Artificial Sequence
  Sythetic
agaagcggccaggacauugg

SEQ ID NO: 5585 - RNA, 20 nt, Artificial Sequence
  Sythetic
augcuacaguagagacacug

SEQ ID NO: 5586 - RNA, 20 nt, Artificial Sequence
  Sythetic
gcgcggcgcaugcgccgcug

SEQ ID NO: 5587 - RNA, 20 nt, Artificial Sequence
  Sythetic
aaacuucaguuuguuggcug

SEQ ID NO: 5588 - RNA, 20 nt, Artificial Sequence
  Sythetic
gcuaggaacgcgucucucug

SEQ ID NO: 5589 - RNA, 20 nt, Artificial Sequence
  Sythetic
uugaccaugccuauauagug

SEQ ID NO: 5590 - RNA, 20 nt, Artificial Sequence
  Sythetic
gggagggagaaggcggggug

SEQ ID NO: 5591 - RNA, 20 nt, Artificial Sequence
  Sythetic
agaggcauuuccuaaguuug

SEQ ID NO: 5592 - RNA, 20 nt, Artificial Sequence
  Sythetic
ccaggggacccugcuguuug

SEQ ID NO: 5593 - RNA, 20 nt, Artificial Sequence
  Sythetic
acuccuuuuaccuccugaau

SEQ ID NO: 5594 - RNA, 20 nt, Artificial Sequence
  Sythetic
ggcagaagcggccaggacau

SEQ ID NO: 5595 - RNA, 20 nt, Artificial Sequence
  Sythetic
ggguggggggggagcaggau

SEQ ID NO: 5596 - RNA, 20 nt, Artificial Sequence
  Sythetic
cccacccacccgcacuauau

SEQ ID NO: 5597 - RNA, 20 nt, Artificial Sequence
  Sythetic
guggauggaauuccagaccu

SEQ ID NO: 5598 - RNA, 20 nt, Artificial Sequence
  Sythetic
cgcaaacagcaggguccccu

SEQ ID NO: 5599 - RNA, 20 nt, Artificial Sequence
  Sythetic
uacuggagcacucaggcccu

SEQ ID NO: 5600 - RNA, 20 nt, Artificial Sequence
  Sythetic
gcaagucacuccccuucccu

SEQ ID NO: 5601 - RNA, 20 nt, Artificial Sequence
  Sythetic
ccuggccgcuucugcccgcu

SEQ ID NO: 5602 - RNA, 20 nt, Artificial Sequence
  Sythetic
agcggcgcaugcgccgcgcu

SEQ ID NO: 5603 - RNA, 20 nt, Artificial Sequence
  Sythetic
gggcggagaggugcgcggcu

SEQ ID NO: 5604 - RNA, 20 nt, Artificial Sequence
  Sythetic
caaacuuaggaaaugccucu

SEQ ID NO: 5605 - RNA, 20 nt, Artificial Sequence
  Sythetic
ggaugcgccugaagacaggu

SEQ ID NO: 5606 - RNA, 20 nt, Artificial Sequence
  Sythetic
ggggagggagaaggcggggu

SEQ ID NO: 5607 - RNA, 20 nt, Artificial Sequence
  Sythetic
ccuauauagugcgggugggu

SEQ ID NO: 5608 - RNA, 20 nt, Artificial Sequence
  Sythetic
cagcauugccgccuacuggu

SEQ ID NO: 5609 - RNA, 20 nt, Artificial Sequence
  Sythetic
cccugcuguuugcggguggu

SEQ ID NO: 5610 - RNA, 20 nt, Artificial Sequence
  Sythetic
ggccagaaacuucaguuugu

SEQ ID NO: 5611 - RNA, 20 nt, Artificial Sequence
  Sythetic
aucccgcuucccucaaacuu

SEQ ID NO: 5612 - RNA, 20 nt, Artificial Sequence
  Sythetic
aggaguaaagauccuuccuu

SEQ ID NO: 5613 - RNA, 20 nt, Artificial Sequence
  Sythetic
agaccaccggucucuuccuu

SEQ ID NO: 5614 - RNA, 20 nt, Artificial Sequence
  Sythetic
ggcggagaggugcgcggcuu

SEQ ID NO: 5615 - RNA, 20 nt, Artificial Sequence
  Sythetic
auggucaagaaaacuccuuu

SEQ ID NO: 5616 - RNA, 17 nt, Artificial Sequence
  Sythetic
agcugcgcggugucaaa

SEQ ID NO: 5617 - RNA, 17 nt, Artificial Sequence
  Sythetic
cagcugcgcggugucaa

SEQ ID NO: 5618 - RNA, 17 nt, Artificial Sequence
  Sythetic
ugaugguaauacccaca

SEQ ID NO: 5619 - RNA, 17 nt, Artificial Sequence
  Sythetic
ccagcgugaaccagaca

SEQ ID NO: 5620 - RNA, 17 nt, Artificial Sequence
  Sythetic
agcgcgccucuucccca

SEQ ID NO: 5621 - RNA, 17 nt, Artificial Sequence
  Sythetic
ggagagaugaaaugcca

SEQ ID NO: 5622 - RNA, 17 nt, Artificial Sequence
  Sythetic
aaugccagggaugggca

SEQ ID NO: 5623 - RNA, 17 nt, Artificial Sequence
  Sythetic
ccggagcgcaaaucuca

SEQ ID NO: 5624 - RNA, 17 nt, Artificial Sequence
  Sythetic
gagauacuuucagaaga

SEQ ID NO: 5625 - RNA, 17 nt, Artificial Sequence
  Sythetic
ccagcacaguaggcaga

SEQ ID NO: 5626 - RNA, 17 nt, Artificial Sequence
  Sythetic
aguccgauauuuauaga

SEQ ID NO: 5627 - RNA, 17 nt, Artificial Sequence
  Sythetic
aaacucugugcggccga

SEQ ID NO: 5628 - RNA, 17 nt, Artificial Sequence
  Sythetic
cugaauuuagaggcgga

SEQ ID NO: 5629 - RNA, 17 nt, Artificial Sequence
  Sythetic
aagaggcgcgcuucgga

SEQ ID NO: 5630 - RNA, 17 nt, Artificial Sequence
  Sythetic
agaugaaaugccaggga

SEQ ID NO: 5631 - RNA, 17 nt, Artificial Sequence
  Sythetic
cgcuucggacggcggga

SEQ ID NO: 5632 - RNA, 17 nt, Artificial Sequence
  Sythetic
ccgcgccgauccucuga

SEQ ID NO: 5633 - RNA, 17 nt, Artificial Sequence
  Sythetic
gagcggguacgggguga

SEQ ID NO: 5634 - RNA, 17 nt, Artificial Sequence
  Sythetic
uaaaugcaucucuguga

SEQ ID NO: 5635 - RNA, 17 nt, Artificial Sequence
  Sythetic
gcgcgcuuuggguuuga

SEQ ID NO: 5636 - RNA, 17 nt, Artificial Sequence
  Sythetic
cauucacagcaucacua

SEQ ID NO: 5637 - RNA, 17 nt, Artificial Sequence
  Sythetic
ggggauaggagcgggua

SEQ ID NO: 5638 - RNA, 17 nt, Artificial Sequence
  Sythetic
gugacuguucuugacac

SEQ ID NO: 5639 - RNA, 17 nt, Artificial Sequence
  Sythetic
cuacugugcugggagac

SEQ ID NO: 5640 - RNA, 17 nt, Artificial Sequence
  Sythetic
ucuguuacaaaaaguac

SEQ ID NO: 5641 - RNA, 17 nt, Artificial Sequence
  Sythetic
gggauaggagcggguac

SEQ ID NO: 5642 - RNA, 17 nt, Artificial Sequence
  Sythetic
ugucaagaacagucacc

SEQ ID NO: 5643 - RNA, 17 nt, Artificial Sequence
  Sythetic
uauggggaccgaagacc

SEQ ID NO: 5644 - RNA, 17 nt, Artificial Sequence
  Sythetic
aagccgggcuugaaccc

SEQ ID NO: 5645 - RNA, 17 nt, Artificial Sequence
  Sythetic
uccugggaacucagccc

SEQ ID NO: 5646 - RNA, 17 nt, Artificial Sequence
  Sythetic
gaaucccugcccauccc

SEQ ID NO: 5647 - RNA, 17 nt, Artificial Sequence
  Sythetic
guacccgcuccuauccc

SEQ ID NO: 5648 - RNA, 17 nt, Artificial Sequence
  Sythetic
gccugggcugaguuccc

SEQ ID NO: 5649 - RNA, 17 nt, Artificial Sequence
  Sythetic
ggcagggauuccaagcc

SEQ ID NO: 5650 - RNA, 17 nt, Artificial Sequence
  Sythetic
agaccuggguucaagcc

SEQ ID NO: 5651 - RNA, 17 nt, Artificial Sequence
  Sythetic
aaaccagcaaauaagcc

SEQ ID NO: 5652 - RNA, 17 nt, Artificial Sequence
  Sythetic
cuucgggguuaagcgcc

SEQ ID NO: 5653 - RNA, 17 nt, Artificial Sequence
  Sythetic
cggagagaugaaaugcc

SEQ ID NO: 5654 - RNA, 17 nt, Artificial Sequence
  Sythetic
gcggagggcggcgugcc

SEQ ID NO: 5655 - RNA, 17 nt, Artificial Sequence
  Sythetic
cgggcgcaaucuccucc

SEQ ID NO: 5656 - RNA, 17 nt, Artificial Sequence
  Sythetic
ccugagauuugcgcucc

SEQ ID NO: 5657 - RNA, 17 nt, Artificial Sequence
  Sythetic
uggcauuucaucucucc

SEQ ID NO: 5658 - RNA, 17 nt, Artificial Sequence
  Sythetic
aaccccgaaguuaaagc

SEQ ID NO: 5659 - RNA, 17 nt, Artificial Sequence
  Sythetic
gggcagggauuccaagc

SEQ ID NO: 5660 - RNA, 17 nt, Artificial Sequence
  Sythetic
gcuccggggauaggagc

SEQ ID NO: 5661 - RNA, 17 nt, Artificial Sequence
  Sythetic
ccuugucugguucacgc

SEQ ID NO: 5662 - RNA, 17 nt, Artificial Sequence
  Sythetic
ucaaacccaaagcgcgc

SEQ ID NO: 5663 - RNA, 17 nt, Artificial Sequence
  Sythetic
cagagggcgggagaggc

SEQ ID NO: 5664 - RNA, 17 nt, Artificial Sequence
  Sythetic
ggcgcgcuucggacggc

SEQ ID NO: 5665 - RNA, 17 nt, Artificial Sequence
  Sythetic
agcgcaaaucucagggc

SEQ ID NO: 5666 - RNA, 17 nt, Artificial Sequence
  Sythetic
cacaguaggcagagggc

SEQ ID NO: 5667 - RNA, 17 nt, Artificial Sequence
  Sythetic
gguacggggugaggggc

SEQ ID NO: 5668 - RNA, 17 nt, Artificial Sequence
  Sythetic
aaaugccagggaugggc

SEQ ID NO: 5669 - RNA, 17 nt, Artificial Sequence
  Sythetic
cugguuucuccgaaugc

SEQ ID NO: 5670 - RNA, 17 nt, Artificial Sequence
  Sythetic
ccaaacucucgaacugc

SEQ ID NO: 5671 - RNA, 17 nt, Artificial Sequence
  Sythetic
cccucugccuacugugc

SEQ ID NO: 5672 - RNA, 17 nt, Artificial Sequence
  Sythetic
ucuccgggcuuauuugc

SEQ ID NO: 5673 - RNA, 17 nt, Artificial Sequence
  Sythetic
cccugagauuugcgcuc

SEQ ID NO: 5674 - RNA, 17 nt, Artificial Sequence
  Sythetic
cccggagcgcaaaucuc

SEQ ID NO: 5675 - RNA, 17 nt, Artificial Sequence
  Sythetic
cuggcauuucaucucuc

SEQ ID NO: 5676 - RNA, 17 nt, Artificial Sequence
  Sythetic
acagcaucacuaggguc

SEQ ID NO: 5677 - RNA, 17 nt, Artificial Sequence
  Sythetic
cgaaugcgggccuuguc

SEQ ID NO: 5678 - RNA, 17 nt, Artificial Sequence
  Sythetic
aggauuuggcauaauuc

SEQ ID NO: 5679 - RNA, 17 nt, Artificial Sequence
  Sythetic
gcgcccgcuuuaacuuc

SEQ ID NO: 5680 - RNA, 17 nt, Artificial Sequence
  Sythetic
gcugcgcggugucaaag

SEQ ID NO: 5681 - RNA, 17 nt, Artificial Sequence
  Sythetic
uaaccccgaaguuaaag

SEQ ID NO: 5682 - RNA, 17 nt, Artificial Sequence
  Sythetic
ucgcggccguggggaag

SEQ ID NO: 5683 - RNA, 17 nt, Artificial Sequence
  Sythetic
cccagcacaguaggcag

SEQ ID NO: 5684 - RNA, 17 nt, Artificial Sequence
  Sythetic
aguuuggggucgugcag

SEQ ID NO: 5685 - RNA, 17 nt, Artificial Sequence
  Sythetic
ccacucgauccccucag

SEQ ID NO: 5686 - RNA, 17 nt, Artificial Sequence
  Sythetic
ggucgugcagaggucag

SEQ ID NO: 5687 - RNA, 17 nt, Artificial Sequence
  Sythetic
uuccccacggccgcgag

SEQ ID NO: 5688 - RNA, 17 nt, Artificial Sequence
  Sythetic
ccucugaggggaucgag

SEQ ID NO: 5689 - RNA, 17 nt, Artificial Sequence
  Sythetic
cgcuccggggauaggag

SEQ ID NO: 5690 - RNA, 17 nt, Artificial Sequence
  Sythetic
ugcagaggucagcggag

SEQ ID NO: 5691 - RNA, 17 nt, Artificial Sequence
  Sythetic
uaggcagagggcgggag

SEQ ID NO: 5692 - RNA, 17 nt, Artificial Sequence
  Sythetic
cgcgccgauccucugag

SEQ ID NO: 5693 - RNA, 17 nt, Artificial Sequence
  Sythetic
agcggguacggggugag

SEQ ID NO: 5694 - RNA, 17 nt, Artificial Sequence
  Sythetic
cgcgcuuuggguuugag

SEQ ID NO: 5695 - RNA, 17 nt, Artificial Sequence
  Sythetic
caguaauuucauaauag

SEQ ID NO: 5696 - RNA, 17 nt, Artificial Sequence
  Sythetic
acauugucugaauuuag

SEQ ID NO: 5697 - RNA, 17 nt, Artificial Sequence
  Sythetic
ggauaggagcggguacg

SEQ ID NO: 5698 - RNA, 17 nt, Artificial Sequence
  Sythetic
ggacccacucgcggccg

SEQ ID NO: 5699 - RNA, 17 nt, Artificial Sequence
  Sythetic
cugagauuugcgcuccg

SEQ ID NO: 5700 - RNA, 17 nt, Artificial Sequence
  Sythetic
cucaaacccaaagcgcg

SEQ ID NO: 5701 - RNA, 17 nt, Artificial Sequence
  Sythetic
cccucagaggaucggcg

SEQ ID NO: 5702 - RNA, 17 nt, Artificial Sequence
  Sythetic
guacggggugaggggcg

SEQ ID NO: 5703 - RNA, 17 nt, Artificial Sequence
  Sythetic
cagggcuggcagcugcg

SEQ ID NO: 5704 - RNA, 17 nt, Artificial Sequence
  Sythetic
acgccuagaacagugcg

SEQ ID NO: 5705 - RNA, 17 nt, Artificial Sequence
  Sythetic
acugcaggacccacucg

SEQ ID NO: 5706 - RNA, 17 nt, Artificial Sequence
  Sythetic
cgcccgcuuuaacuucg

SEQ ID NO: 5707 - RNA, 17 nt, Artificial Sequence
  Sythetic
ugggcugaguucccagg

SEQ ID NO: 5708 - RNA, 17 nt, Artificial Sequence
  Sythetic
gcagagggcgggagagg

SEQ ID NO: 5709 - RNA, 17 nt, Artificial Sequence
  Sythetic
uugucugaauuuagagg

SEQ ID NO: 5710 - RNA, 17 nt, Artificial Sequence
  Sythetic
gcgcuuuggguuugagg

SEQ ID NO: 5711 - RNA, 17 nt, Artificial Sequence
  Sythetic
aggcgcgcuucggacgg

SEQ ID NO: 5712 - RNA, 17 nt, Artificial Sequence
  Sythetic
ucagaggaucggcgcgg

SEQ ID NO: 5713 - RNA, 17 nt, Artificial Sequence
  Sythetic
ucugaauuuagaggcgg

SEQ ID NO: 5714 - RNA, 17 nt, Artificial Sequence
  Sythetic
uacggggugaggggcgg

SEQ ID NO: 5715 - RNA, 17 nt, Artificial Sequence
  Sythetic
gcacaguaggcagaggg

SEQ ID NO: 5716 - RNA, 17 nt, Artificial Sequence
  Sythetic
aauuuagaggcggaggg

SEQ ID NO: 5717 - RNA, 17 nt, Artificial Sequence
  Sythetic
aacccaaagcgcgcggg

SEQ ID NO: 5718 - RNA, 17 nt, Artificial Sequence
  Sythetic
agggcgggagaggcggg

SEQ ID NO: 5719 - RNA, 17 nt, Artificial Sequence
  Sythetic
gcgcggugucaaagggg

SEQ ID NO: 5720 - RNA, 17 nt, Artificial Sequence
  Sythetic
ggguacggggugagggg

SEQ ID NO: 5721 - RNA, 17 nt, Artificial Sequence
  Sythetic
ggggugaggggcggggg

SEQ ID NO: 5722 - RNA, 17 nt, Artificial Sequence
  Sythetic
cugaggggaucgagugg

SEQ ID NO: 5723 - RNA, 17 nt, Artificial Sequence
  Sythetic
gcugguuucuccgaaug

SEQ ID NO: 5724 - RNA, 17 nt, Artificial Sequence
  Sythetic
ggaagacgccgaguaug

SEQ ID NO: 5725 - RNA, 17 nt, Artificial Sequence
  Sythetic
accgcgccgauccucug

SEQ ID NO: 5726 - RNA, 17 nt, Artificial Sequence
  Sythetic
auucucacaacaccgug

SEQ ID NO: 5727 - RNA, 17 nt, Artificial Sequence
  Sythetic
acccacucgcggccgug

SEQ ID NO: 5728 - RNA, 17 nt, Artificial Sequence
  Sythetic
ggagcggguacggggug

SEQ ID NO: 5729 - RNA, 17 nt, Artificial Sequence
  Sythetic
guuuguuaaacucugug

SEQ ID NO: 5730 - RNA, 17 nt, Artificial Sequence
  Sythetic
cacuguucuaggcguug

SEQ ID NO: 5731 - RNA, 17 nt, Artificial Sequence
  Sythetic
ugcaguucgagaguuug

SEQ ID NO: 5732 - RNA, 17 nt, Artificial Sequence
  Sythetic
cgcgcgcuuuggguuug

SEQ ID NO: 5733 - RNA, 17 nt, Artificial Sequence
  Sythetic
aagcacuauucgcgaau

SEQ ID NO: 5734 - RNA, 17 nt, Artificial Sequence
  Sythetic
cgauccccucagaggau

SEQ ID NO: 5735 - RNA, 17 nt, Artificial Sequence
  Sythetic
gaugaaaugccagggau

SEQ ID NO: 5736 - RNA, 17 nt, Artificial Sequence
  Sythetic
auuugcgcuccggggau

SEQ ID NO: 5737 - RNA, 17 nt, Artificial Sequence
  Sythetic
cguccuucuauaaauau

SEQ ID NO: 5738 - RNA, 17 nt, Artificial Sequence
  Sythetic
ugacuguucuugacacu

SEQ ID NO: 5739 - RNA, 17 nt, Artificial Sequence
  Sythetic
acauucacagcaucacu

SEQ ID NO: 5740 - RNA, 17 nt, Artificial Sequence
  Sythetic
uuuuguaacagaucacu

SEQ ID NO: 5741 - RNA, 17 nt, Artificial Sequence
  Sythetic
ucuucgguccccauacu

SEQ ID NO: 5742 - RNA, 17 nt, Artificial Sequence
  Sythetic
auggggaccgaagaccu

SEQ ID NO: 5743 - RNA, 17 nt, Artificial Sequence
  Sythetic
cggagggcggcgugccu

SEQ ID NO: 5744 - RNA, 17 nt, Artificial Sequence
  Sythetic
gggcgcaaucuccuccu

SEQ ID NO: 5745 - RNA, 17 nt, Artificial Sequence
  Sythetic
gagugguggcagcagcu

SEQ ID NO: 5746 - RNA, 17 nt, Artificial Sequence
  Sythetic
uggguucaagcccggcu

SEQ ID NO: 5747 - RNA, 17 nt, Artificial Sequence
  Sythetic
ccucugccuacugugcu

SEQ ID NO: 5748 - RNA, 17 nt, Artificial Sequence
  Sythetic
gugccacgcacuguucu

SEQ ID NO: 5749 - RNA, 17 nt, Artificial Sequence
  Sythetic
cagucucccagcacagu

SEQ ID NO: 5750 - RNA, 17 nt, Artificial Sequence
  Sythetic
uccccacggccgcgagu

SEQ ID NO: 5751 - RNA, 17 nt, Artificial Sequence
  Sythetic
gacccacucgcggccgu

SEQ ID NO: 5752 - RNA, 17 nt, Artificial Sequence
  Sythetic
gacuggcacagcuccgu

SEQ ID NO: 5753 - RNA, 17 nt, Artificial Sequence
  Sythetic
cgcacuguucuaggcgu

SEQ ID NO: 5754 - RNA, 17 nt, Artificial Sequence
  Sythetic
uacuuucagaagaaggu

SEQ ID NO: 5755 - RNA, 17 nt, Artificial Sequence
  Sythetic
cagaggaucggcgcggu

SEQ ID NO: 5756 - RNA, 17 nt, Artificial Sequence
  Sythetic
uucucacaacaccgugu

SEQ ID NO: 5757 - RNA, 17 nt, Artificial Sequence
  Sythetic
gucaggugcagauaauu

SEQ ID NO: 5758 - RNA, 17 nt, Artificial Sequence
  Sythetic
cagacaaggcccgcauu

SEQ ID NO: 5759 - RNA, 17 nt, Artificial Sequence
  Sythetic
cagaagaagguaggauu

SEQ ID NO: 5760 - RNA, 17 nt, Artificial Sequence
  Sythetic
ugcgcccgcuuuaacuu

SEQ ID NO: 5761 - RNA, 17 nt, Artificial Sequence
  Sythetic
gauccgcccgcgcgcuu

SEQ ID NO: 5762 - RNA, 17 nt, Artificial Sequence
  Sythetic
ggggaagaggcgcgcuu

SEQ ID NO: 5763 - RNA, 17 nt, Artificial Sequence
  Sythetic
gcuugaacccaggucuu

SEQ ID NO: 5764 - RNA, 17 nt, Artificial Sequence
  Sythetic
ccugcaguucgagaguu

SEQ ID NO: 5765 - RNA, 17 nt, Artificial Sequence
  Sythetic
gcacuguucuaggcguu

SEQ ID NO: 5766 - RNA, 17 nt, Artificial Sequence
  Sythetic
auccgcccgcgcgcuuu

SEQ ID NO: 5767 - RNA, 17 nt, Artificial Sequence
  Sythetic
cugcaguucgagaguuu

SEQ ID NO: 5768 - RNA, 17 nt, Artificial Sequence
  Sythetic
uaauaaagcauacuuuu

SEQ ID NO: 5769 - RNA, 20 nt, Artificial Sequence
  Sythetic
ggcagcugcgcggugucaaa

SEQ ID NO: 5770 - RNA, 20 nt, Artificial Sequence
  Sythetic
uggcagcugcgcggugucaa

SEQ ID NO: 5771 - RNA, 20 nt, Artificial Sequence
  Sythetic
cugugaugguaauacccaca

SEQ ID NO: 5772 - RNA, 20 nt, Artificial Sequence
  Sythetic
gauccagcgugaaccagaca

SEQ ID NO: 5773 - RNA, 20 nt, Artificial Sequence
  Sythetic
cgaagcgcgccucuucccca

SEQ ID NO: 5774 - RNA, 20 nt, Artificial Sequence
  Sythetic
cccggagagaugaaaugcca

SEQ ID NO: 5775 - RNA, 20 nt, Artificial Sequence
  Sythetic
ugaaaugccagggaugggca

SEQ ID NO: 5776 - RNA, 20 nt, Artificial Sequence
  Sythetic
uccccggagcgcaaaucuca

SEQ ID NO: 5777 - RNA, 20 nt, Artificial Sequence
  Sythetic
uaggagauacuuucagaaga

SEQ ID NO: 5778 - RNA, 20 nt, Artificial Sequence
  Sythetic
cucccagcacaguaggcaga

SEQ ID NO: 5779 - RNA, 20 nt, Artificial Sequence
  Sythetic
uuuaguccgauauuuauaga

SEQ ID NO: 5780 - RNA, 20 nt, Artificial Sequence
  Sythetic
guuaaacucugugcggccga

SEQ ID NO: 5781 - RNA, 20 nt, Artificial Sequence
  Sythetic
ugucugaauuuagaggcgga

SEQ ID NO: 5782 - RNA, 20 nt, Artificial Sequence
  Sythetic
gggaagaggcgcgcuucgga

SEQ ID NO: 5783 - RNA, 20 nt, Artificial Sequence
  Sythetic
gagagaugaaaugccaggga

SEQ ID NO: 5784 - RNA, 20 nt, Artificial Sequence
  Sythetic
gcgcgcuucggacggcggga

SEQ ID NO: 5785 - RNA, 20 nt, Artificial Sequence
  Sythetic
ccaccgcgccgauccucuga

SEQ ID NO: 5786 - RNA, 20 nt, Artificial Sequence
  Sythetic
uaggagcggguacgggguga

SEQ ID NO: 5787 - RNA, 20 nt, Artificial Sequence
  Sythetic
gacuaaaugcaucucuguga

SEQ ID NO: 5788 - RNA, 20 nt, Artificial Sequence
  Sythetic
cccgcgcgcuuuggguuuga

SEQ ID NO: 5789 - RNA, 20 nt, Artificial Sequence
  Sythetic
gcacauucacagcaucacua

SEQ ID NO: 5790 - RNA, 20 nt, Artificial Sequence
  Sythetic
uccggggauaggagcgggua

SEQ ID NO: 5791 - RNA, 20 nt, Artificial Sequence
  Sythetic
cuggugacuguucuugacac

SEQ ID NO: 5792 - RNA, 20 nt, Artificial Sequence
  Sythetic
ugccuacugugcugggagac

SEQ ID NO: 5793 - RNA, 20 nt, Artificial Sequence
  Sythetic
ugaucuguuacaaaaaguac

SEQ ID NO: 5794 - RNA, 20 nt, Artificial Sequence
  Sythetic
ccggggauaggagcggguac

SEQ ID NO: 5795 - RNA, 20 nt, Artificial Sequence
  Sythetic
cagugucaagaacagucacc

SEQ ID NO: 5796 - RNA, 20 nt, Artificial Sequence
  Sythetic
gaguauggggaccgaagacc

SEQ ID NO: 5797 - RNA, 20 nt, Artificial Sequence
  Sythetic
uccaagccgggcuugaaccc

SEQ ID NO: 5798 - RNA, 20 nt, Artificial Sequence
  Sythetic
uccuccugggaacucagccc

SEQ ID NO: 5799 - RNA, 20 nt, Artificial Sequence
  Sythetic
uuggaaucccugcccauccc

SEQ ID NO: 5800 - RNA, 20 nt, Artificial Sequence
  Sythetic
cccguacccgcuccuauccc

SEQ ID NO: 5801 - RNA, 20 nt, Artificial Sequence
  Sythetic
cgugccugggcugaguuccc

SEQ ID NO: 5802 - RNA, 20 nt, Artificial Sequence
  Sythetic
augggcagggauuccaagcc

SEQ ID NO: 5803 - RNA, 20 nt, Artificial Sequence
  Sythetic
cgaagaccuggguucaagcc

SEQ ID NO: 5804 - RNA, 20 nt, Artificial Sequence
  Sythetic
gagaaaccagcaaauaagcc

SEQ ID NO: 5805 - RNA, 20 nt, Artificial Sequence
  Sythetic
uaacuucgggguuaagcgcc

SEQ ID NO: 5806 - RNA, 20 nt, Artificial Sequence
  Sythetic
gcccggagagaugaaaugcc

SEQ ID NO: 5807 - RNA, 20 nt, Artificial Sequence
  Sythetic
gaggcggagggcggcgugcc

SEQ ID NO: 5808 - RNA, 20 nt, Artificial Sequence
  Sythetic
aagcgggcgcaaucuccucc

SEQ ID NO: 5809 - RNA, 20 nt, Artificial Sequence
  Sythetic
agcccugagauuugcgcucc

SEQ ID NO: 5810 - RNA, 20 nt, Artificial Sequence
  Sythetic
cccuggcauuucaucucucc

SEQ ID NO: 5811 - RNA, 20 nt, Artificial Sequence
  Sythetic
cuuaaccccgaaguuaaagc

SEQ ID NO: 5812 - RNA, 20 nt, Artificial Sequence
  Sythetic
gaugggcagggauuccaagc

SEQ ID NO: 5813 - RNA, 20 nt, Artificial Sequence
  Sythetic
ugcgcuccggggauaggagc

SEQ ID NO: 5814 - RNA, 20 nt, Artificial Sequence
  Sythetic
gggccuugucugguucacgc

SEQ ID NO: 5815 - RNA, 20 nt, Artificial Sequence
  Sythetic
cccucaaacccaaagcgcgc

SEQ ID NO: 5816 - RNA, 20 nt, Artificial Sequence
  Sythetic
aggcagagggcgggagaggc

SEQ ID NO: 5817 - RNA, 20 nt, Artificial Sequence
  Sythetic
agaggcgcgcuucggacggc

SEQ ID NO: 5818 - RNA, 20 nt, Artificial Sequence
  Sythetic
cggagcgcaaaucucagggc

SEQ ID NO: 5819 - RNA, 20 nt, Artificial Sequence
  Sythetic
cagcacaguaggcagagggc

SEQ ID NO: 5820 - RNA, 20 nt, Artificial Sequence
  Sythetic
gcggguacggggugaggggc

SEQ ID NO: 5821 - RNA, 20 nt, Artificial Sequence
  Sythetic
augaaaugccagggaugggc

SEQ ID NO: 5822 - RNA, 20 nt, Artificial Sequence
  Sythetic
uugcugguuucuccgaaugc

SEQ ID NO: 5823 - RNA, 20 nt, Artificial Sequence
  Sythetic
accccaaacucucgaacugc

SEQ ID NO: 5824 - RNA, 20 nt, Artificial Sequence
  Sythetic
ccgcccucugccuacugugc

SEQ ID NO: 5825 - RNA, 20 nt, Artificial Sequence
  Sythetic
aucucuccgggcuuauuugc

SEQ ID NO: 5826 - RNA, 20 nt, Artificial Sequence
  Sythetic
cagcccugagauuugcgcuc

SEQ ID NO: 5827 - RNA, 20 nt, Artificial Sequence
  Sythetic
auccccggagcgcaaaucuc

SEQ ID NO: 5828 - RNA, 20 nt, Artificial Sequence
  Sythetic
ucccuggcauuucaucucuc

SEQ ID NO: 5829 - RNA, 20 nt, Artificial Sequence
  Sythetic
uucacagcaucacuaggguc

SEQ ID NO: 5830 - RNA, 20 nt, Artificial Sequence
  Sythetic
cuccgaaugcgggccuuguc

SEQ ID NO: 5831 - RNA, 20 nt, Artificial Sequence
  Sythetic
gguaggauuuggcauaauuc

SEQ ID NO: 5832 - RNA, 20 nt, Artificial Sequence
  Sythetic
auugcgcccgcuuuaacuuc

SEQ ID NO: 5833 - RNA, 20 nt, Artificial Sequence
  Sythetic
gcagcugcgcggugucaaag

SEQ ID NO: 5834 - RNA, 20 nt, Artificial Sequence
  Sythetic
gcuuaaccccgaaguuaaag

SEQ ID NO: 5835 - RNA, 20 nt, Artificial Sequence
  Sythetic
cacucgcggccguggggaag

SEQ ID NO: 5836 - RNA, 20 nt, Artificial Sequence
  Sythetic
ucucccagcacaguaggcag

SEQ ID NO: 5837 - RNA, 20 nt, Artificial Sequence
  Sythetic
gagaguuuggggucgugcag

SEQ ID NO: 5838 - RNA, 20 nt, Artificial Sequence
  Sythetic
ccaccacucgauccccucag

SEQ ID NO: 5839 - RNA, 20 nt, Artificial Sequence
  Sythetic
uggggucgugcagaggucag

SEQ ID NO: 5840 - RNA, 20 nt, Artificial Sequence
  Sythetic
cucuuccccacggccgcgag

SEQ ID NO: 5841 - RNA, 20 nt, Artificial Sequence
  Sythetic
gauccucugaggggaucgag

SEQ ID NO: 5842 - RNA, 20 nt, Artificial Sequence
  Sythetic
uugcgcuccggggauaggag

SEQ ID NO: 5843 - RNA, 20 nt, Artificial Sequence
  Sythetic
ucgugcagaggucagcggag

SEQ ID NO: 5844 - RNA, 20 nt, Artificial Sequence
  Sythetic
caguaggcagagggcgggag

SEQ ID NO: 5845 - RNA, 20 nt, Artificial Sequence
  Sythetic
caccgcgccgauccucugag

SEQ ID NO: 5846 - RNA, 20 nt, Artificial Sequence
  Sythetic
aggagcggguacggggugag

SEQ ID NO: 5847 - RNA, 20 nt, Artificial Sequence
  Sythetic
ccgcgcgcuuuggguuugag

SEQ ID NO: 5848 - RNA, 20 nt, Artificial Sequence
  Sythetic
gcucaguaauuucauaauag

SEQ ID NO: 5849 - RNA, 20 nt, Artificial Sequence
  Sythetic
guuacauugucugaauuuag

SEQ ID NO: 5850 - RNA, 20 nt, Artificial Sequence
  Sythetic
cggggauaggagcggguacg

SEQ ID NO: 5851 - RNA, 20 nt, Artificial Sequence
  Sythetic
gcaggacccacucgcggccg

SEQ ID NO: 5852 - RNA, 20 nt, Artificial Sequence
  Sythetic
gcccugagauuugcgcuccg

SEQ ID NO: 5853 - RNA, 20 nt, Artificial Sequence
  Sythetic
ccccucaaacccaaagcgcg

SEQ ID NO: 5854 - RNA, 20 nt, Artificial Sequence
  Sythetic
auccccucagaggaucggcg

SEQ ID NO: 5855 - RNA, 20 nt, Artificial Sequence
  Sythetic
cggguacggggugaggggcg

SEQ ID NO: 5856 - RNA, 20 nt, Artificial Sequence
  Sythetic
ucucagggcuggcagcugcg

SEQ ID NO: 5857 - RNA, 20 nt, Artificial Sequence
  Sythetic
ccaacgccuagaacagugcg

SEQ ID NO: 5858 - RNA, 20 nt, Artificial Sequence
  Sythetic
cgaacugcaggacccacucg

SEQ ID NO: 5859 - RNA, 20 nt, Artificial Sequence
  Sythetic
uugcgcccgcuuuaacuucg

SEQ ID NO: 5860 - RNA, 20 nt, Artificial Sequence
  Sythetic
gccugggcugaguucccagg

SEQ ID NO: 5861 - RNA, 20 nt, Artificial Sequence
  Sythetic
uaggcagagggcgggagagg

SEQ ID NO: 5862 - RNA, 20 nt, Artificial Sequence
  Sythetic
acauugucugaauuuagagg

SEQ ID NO: 5863 - RNA, 20 nt, Artificial Sequence
  Sythetic
cgcgcgcuuuggguuugagg

SEQ ID NO: 5864 - RNA, 20 nt, Artificial Sequence
  Sythetic
aagaggcgcgcuucggacgg

SEQ ID NO: 5865 - RNA, 20 nt, Artificial Sequence
  Sythetic
cccucagaggaucggcgcgg

SEQ ID NO: 5866 - RNA, 20 nt, Artificial Sequence
  Sythetic
uugucugaauuuagaggcgg

SEQ ID NO: 5867 - RNA, 20 nt, Artificial Sequence
  Sythetic
ggguacggggugaggggcgg

SEQ ID NO: 5868 - RNA, 20 nt, Artificial Sequence
  Sythetic
ccagcacaguaggcagaggg

SEQ ID NO: 5869 - RNA, 20 nt, Artificial Sequence
  Sythetic
cugaauuuagaggcggaggg

SEQ ID NO: 5870 - RNA, 20 nt, Artificial Sequence
  Sythetic
ucaaacccaaagcgcgcggg

SEQ ID NO: 5871 - RNA, 20 nt, Artificial Sequence
  Sythetic
cagagggcgggagaggcggg

SEQ ID NO: 5872 - RNA, 20 nt, Artificial Sequence
  Sythetic
gcugcgcggugucaaagggg

SEQ ID NO: 5873 - RNA, 20 nt, Artificial Sequence
  Sythetic
agcggguacggggugagggg

SEQ ID NO: 5874 - RNA, 20 nt, Artificial Sequence
  Sythetic
uacggggugaggggcggggg

SEQ ID NO: 5875 - RNA, 20 nt, Artificial Sequence
  Sythetic
ccucugaggggaucgagugg

SEQ ID NO: 5876 - RNA, 20 nt, Artificial Sequence
  Sythetic
uuugcugguuucuccgaaug

SEQ ID NO: 5877 - RNA, 20 nt, Artificial Sequence
  Sythetic
cccaccgcgccgauccucug

SEQ ID NO: 5878 - RNA, 20 nt, Artificial Sequence
  Sythetic
uucauucucacaacaccgug

SEQ ID NO: 5879 - RNA, 20 nt, Artificial Sequence
  Sythetic
aggacccacucgcggccgug

SEQ ID NO: 5880 - RNA, 20 nt, Artificial Sequence
  Sythetic
auaggagcggguacggggug

SEQ ID NO: 5881 - RNA, 20 nt, Artificial Sequence
  Sythetic
cguguuuguuaaacucugug

SEQ ID NO: 5882 - RNA, 20 nt, Artificial Sequence
  Sythetic
acgcacuguucuaggcguug

SEQ ID NO: 5883 - RNA, 20 nt, Artificial Sequence
  Sythetic
uccugcaguucgagaguuug

SEQ ID NO: 5884 - RNA, 20 nt, Artificial Sequence
  Sythetic
gcccgcgcgcuuuggguuug

SEQ ID NO: 5885 - RNA, 20 nt, Artificial Sequence
  Sythetic
auaaagcacuauucgcgaau

SEQ ID NO: 5886 - RNA, 20 nt, Artificial Sequence
  Sythetic
acucgauccccucagaggau

SEQ ID NO: 5887 - RNA, 20 nt, Artificial Sequence
  Sythetic
agagaugaaaugccagggau

SEQ ID NO: 5888 - RNA, 20 nt, Artificial Sequence
  Sythetic
gagauuugcgcuccggggau

SEQ ID NO: 5889 - RNA, 20 nt, Artificial Sequence
  Sythetic
guucguccuucuauaaauau

SEQ ID NO: 5890 - RNA, 20 nt, Artificial Sequence
  Sythetic
uggugacuguucuugacacu

SEQ ID NO: 5891 - RNA, 20 nt, Artificial Sequence
  Sythetic
ugcacauucacagcaucacu

SEQ ID NO: 5892 - RNA, 20 nt, Artificial Sequence
  Sythetic
acuuuuuguaacagaucacu

SEQ ID NO: 5893 - RNA, 20 nt, Artificial Sequence
  Sythetic
aggucuucgguccccauacu

SEQ ID NO: 5894 - RNA, 20 nt, Artificial Sequence
  Sythetic
aguauggggaccgaagaccu

SEQ ID NO: 5895 - RNA, 20 nt, Artificial Sequence
  Sythetic
aggcggagggcggcgugccu

SEQ ID NO: 5896 - RNA, 20 nt, Artificial Sequence
  Sythetic
agcgggcgcaaucuccuccu

SEQ ID NO: 5897 - RNA, 20 nt, Artificial Sequence
  Sythetic
aucgagugguggcagcagcu

SEQ ID NO: 5898 - RNA, 20 nt, Artificial Sequence
  Sythetic
accuggguucaagcccggcu

SEQ ID NO: 5899 - RNA, 20 nt, Artificial Sequence
  Sythetic
cgcccucugccuacugugcu

SEQ ID NO: 5900 - RNA, 20 nt, Artificial Sequence
  Sythetic
ugcgugccacgcacuguucu

SEQ ID NO: 5901 - RNA, 20 nt, Artificial Sequence
  Sythetic
ugccagucucccagcacagu

SEQ ID NO: 5902 - RNA, 20 nt, Artificial Sequence
  Sythetic
ucuuccccacggccgcgagu

SEQ ID NO: 5903 - RNA, 20 nt, Artificial Sequence
  Sythetic
caggacccacucgcggccgu

SEQ ID NO: 5904 - RNA, 20 nt, Artificial Sequence
  Sythetic
ggagacuggcacagcuccgu

SEQ ID NO: 5905 - RNA, 20 nt, Artificial Sequence
  Sythetic
ccacgcacuguucuaggcgu

SEQ ID NO: 5906 - RNA, 20 nt, Artificial Sequence
  Sythetic
agauacuuucagaagaaggu

SEQ ID NO: 5907 - RNA, 20 nt, Artificial Sequence
  Sythetic
ccucagaggaucggcgcggu

SEQ ID NO: 5908 - RNA, 20 nt, Artificial Sequence
  Sythetic
ucauucucacaacaccgugu

SEQ ID NO: 5909 - RNA, 20 nt, Artificial Sequence
  Sythetic
agggucaggugcagauaauu

SEQ ID NO: 5910 - RNA, 20 nt, Artificial Sequence
  Sythetic
aaccagacaaggcccgcauu

SEQ ID NO: 5911 - RNA, 20 nt, Artificial Sequence
  Sythetic
uuucagaagaagguaggauu

SEQ ID NO: 5912 - RNA, 20 nt, Artificial Sequence
  Sythetic
gauugcgcccgcuuuaacuu

SEQ ID NO: 5913 - RNA, 20 nt, Artificial Sequence
  Sythetic
guugauccgcccgcgcgcuu

SEQ ID NO: 5914 - RNA, 20 nt, Artificial Sequence
  Sythetic
cguggggaagaggcgcgcuu

SEQ ID NO: 5915 - RNA, 20 nt, Artificial Sequence
  Sythetic
cgggcuugaacccaggucuu

SEQ ID NO: 5916 - RNA, 20 nt, Artificial Sequence
  Sythetic
gguccugcaguucgagaguu

SEQ ID NO: 5917 - RNA, 20 nt, Artificial Sequence
  Sythetic
cacgcacuguucuaggcguu

SEQ ID NO: 5918 - RNA, 20 nt, Artificial Sequence
  Sythetic
uugauccgcccgcgcgcuuu

SEQ ID NO: 5919 - RNA, 20 nt, Artificial Sequence
  Sythetic
guccugcaguucgagaguuu

SEQ ID NO: 5920 - RNA, 20 nt, Artificial Sequence
  Sythetic
uuauaauaaagcauacuuuu

SEQ ID NO: 5921 - RNA, 18 nt, Artificial Sequence
  Sythetic
gcguccauccuugcuaaa

SEQ ID NO: 5922 - RNA, 19 nt, Artificial Sequence
  Sythetic
cgcguccauccuugcuaaa

SEQ ID NO: 5923 - RNA, 20 nt, Artificial Sequence
  Sythetic
gcgcguccauccuugcuaaa

SEQ ID NO: 5924 - RNA, 21 nt, Artificial Sequence
  Sythetic
ggcgcguccauccuugcuaaa

SEQ ID NO: 5925 - RNA, 22 nt, Artificial Sequence
  Sythetic
uggcgcguccauccuugcuaaa

SEQ ID NO: 5926 - RNA, 23 nt, Artificial Sequence
  Sythetic
guggcgcguccauccuugcuaaa

SEQ ID NO: 5927 - RNA, 24 nt, Artificial Sequence
  Sythetic
uguggcgcguccauccuugcuaaa

SEQ ID NO: 5928 - RNA, 21 nt, Artificial Sequence
  Sythetic
gcagcccauucaggagguaaa

SEQ ID NO: 5929 - RNA, 22 nt, Artificial Sequence
  Sythetic
cgcagcccauucaggagguaaa

SEQ ID NO: 5930 - RNA, 23 nt, Artificial Sequence
  Sythetic
acgcagcccauucaggagguaaa

SEQ ID NO: 5931 - RNA, 24 nt, Artificial Sequence
  Sythetic
gacgcagcccauucaggagguaaa

SEQ ID NO: 5932 - RNA, 21 nt, Artificial Sequence
  Sythetic
cgccuucucugcacuugugca

SEQ ID NO: 5933 - RNA, 22 nt, Artificial Sequence
  Sythetic
acgccuucucugcacuugugca

SEQ ID NO: 5934 - RNA, 23 nt, Artificial Sequence
  Sythetic
cacgccuucucugcacuugugca

SEQ ID NO: 5935 - RNA, 24 nt, Artificial Sequence
  Sythetic
gcacgccuucucugcacuugugca

SEQ ID NO: 5936 - RNA, 21 nt, Artificial Sequence
  Sythetic
guccauccuugcuaaagugga

SEQ ID NO: 5937 - RNA, 22 nt, Artificial Sequence
  Sythetic
cguccauccuugcuaaagugga

SEQ ID NO: 5938 - RNA, 23 nt, Artificial Sequence
  Sythetic
gcguccauccuugcuaaagugga

SEQ ID NO: 5939 - RNA, 24 nt, Artificial Sequence
  Sythetic
cgcguccauccuugcuaaagugga

SEQ ID NO: 5940 - RNA, 18 nt, Artificial Sequence
  Sythetic
guuugcggguggucggua

SEQ ID NO: 5941 - RNA, 19 nt, Artificial Sequence
  Sythetic
uguuugcggguggucggua

SEQ ID NO: 5942 - RNA, 20 nt, Artificial Sequence
  Sythetic
cuguuugcggguggucggua

SEQ ID NO: 5943 - RNA, 21 nt, Artificial Sequence
  Sythetic
gcuguuugcggguggucggua

SEQ ID NO: 5944 - RNA, 22 nt, Artificial Sequence
  Sythetic
ugcuguuugcggguggucggua

SEQ ID NO: 5945 - RNA, 23 nt, Artificial Sequence
  Sythetic
cugcuguuugcggguggucggua

SEQ ID NO: 5946 - RNA, 24 nt, Artificial Sequence
  Sythetic
ccugcuguuugcggguggucggua

SEQ ID NO: 5947 - RNA, 21 nt, Artificial Sequence
  Sythetic
ucggugacccuuuuuuggagu

SEQ ID NO: 5948 - RNA, 22 nt, Artificial Sequence
  Sythetic
uucggugacccuuuuuuggagu

SEQ ID NO: 5949 - RNA, 23 nt, Artificial Sequence
  Sythetic
uuucggugacccuuuuuuggagu

SEQ ID NO: 5950 - RNA, 24 nt, Artificial Sequence
  Sythetic
cuuucggugacccuuuuuuggagu

SEQ ID NO: 5951 - RNA, 18 nt, Artificial Sequence
  Sythetic
aaggaagagaccgguggu

SEQ ID NO: 5952 - RNA, 19 nt, Artificial Sequence
  Sythetic
caaggaagagaccgguggu

SEQ ID NO: 5953 - RNA, 20 nt, Artificial Sequence
  Sythetic
ccaaggaagagaccgguggu

SEQ ID NO: 5954 - RNA, 18 nt, Artificial Sequence
  Sythetic
cuuucggugacccuuuuu

SEQ ID NO: 5955 - RNA, 19 nt, Artificial Sequence
  Sythetic
ccuuucggugacccuuuuu

SEQ ID NO: 5956 - RNA, 20 nt, Artificial Sequence
  Sythetic
uccuuucggugacccuuuuu

SEQ ID NO: 5957 - RNA, 21 nt, Artificial Sequence
  Sythetic
cuccuuucggugacccuuuuu

SEQ ID NO: 5958 - RNA, 22 nt, Artificial Sequence
  Sythetic
acuccuuucggugacccuuuuu

SEQ ID NO: 5959 - RNA, 23 nt, Artificial Sequence
  Sythetic
aacuccuuucggugacccuuuuu

SEQ ID NO: 5960 - RNA, 24 nt, Artificial Sequence
  Sythetic
aaacuccuuucggugacccuuuuu

SEQ ID NO: 5961 - RNA, 18 nt, Artificial Sequence
  Sythetic
gguacccguacuccaaaa

SEQ ID NO: 5962 - RNA, 19 nt, Artificial Sequence
  Sythetic
agguacccguacuccaaaa

SEQ ID NO: 5963 - RNA, 20 nt, Artificial Sequence
  Sythetic
gagguacccguacuccaaaa

SEQ ID NO: 5964 - RNA, 21 nt, Artificial Sequence
  Sythetic
ggagguacccguacuccaaaa

SEQ ID NO: 5965 - RNA, 22 nt, Artificial Sequence
  Sythetic
uggagguacccguacuccaaaa

SEQ ID NO: 5966 - RNA, 23 nt, Artificial Sequence
  Sythetic
uuggagguacccguacuccaaaa

SEQ ID NO: 5967 - RNA, 24 nt, Artificial Sequence
  Sythetic
auuggagguacccguacuccaaaa

SEQ ID NO: 5968 - RNA, 18 nt, Artificial Sequence
  Sythetic
caaaaaagggucaccgaa

SEQ ID NO: 5969 - RNA, 19 nt, Artificial Sequence
  Sythetic
ccaaaaaagggucaccgaa

SEQ ID NO: 5970 - RNA, 20 nt, Artificial Sequence
  Sythetic
uccaaaaaagggucaccgaa

SEQ ID NO: 5971 - RNA, 21 nt, Artificial Sequence
  Sythetic
cuccaaaaaagggucaccgaa

SEQ ID NO: 5972 - RNA, 22 nt, Artificial Sequence
  Sythetic
acuccaaaaaagggucaccgaa

SEQ ID NO: 5973 - RNA, 23 nt, Artificial Sequence
  Sythetic
uacuccaaaaaagggucaccgaa

SEQ ID NO: 5974 - RNA, 24 nt, Artificial Sequence
  Sythetic
guacuccaaaaaagggucaccgaa

SEQ ID NO: 5975 - RNA, 21 nt, Artificial Sequence
  Sythetic
agaaccagcgguuaccaugga

SEQ ID NO: 5976 - RNA, 22 nt, Artificial Sequence
  Sythetic
gagaaccagcgguuaccaugga

SEQ ID NO: 5977 - RNA, 23 nt, Artificial Sequence
  Sythetic
ggagaaccagcgguuaccaugga

SEQ ID NO: 5978 - RNA, 24 nt, Artificial Sequence
  Sythetic
uggagaaccagcgguuaccaugga

SEQ ID NO: 5979 - RNA, 18 nt, Artificial Sequence
  Sythetic
gcugcaugugucuccccc

SEQ ID NO: 5980 - RNA, 19 nt, Artificial Sequence
  Sythetic
ggcugcaugugucuccccc

SEQ ID NO: 5981 - RNA, 20 nt, Artificial Sequence
  Sythetic
uggcugcaugugucuccccc

SEQ ID NO: 5982 - RNA, 21 nt, Artificial Sequence
  Sythetic
guggcugcaugugucuccccc

SEQ ID NO: 5983 - RNA, 22 nt, Artificial Sequence
  Sythetic
aguggcugcaugugucuccccc

SEQ ID NO: 5984 - RNA, 23 nt, Artificial Sequence
  Sythetic
caguggcugcaugugucuccccc

SEQ ID NO: 5985 - RNA, 24 nt, Artificial Sequence
  Sythetic
ccaguggcugcaugugucuccccc

SEQ ID NO: 5986 - RNA, 18 nt, Artificial Sequence
  Sythetic
aauuccauccacuuuagc

SEQ ID NO: 5987 - RNA, 19 nt, Artificial Sequence
  Sythetic
gaauuccauccacuuuagc

SEQ ID NO: 5988 - RNA, 20 nt, Artificial Sequence
  Sythetic
ggaauuccauccacuuuagc

SEQ ID NO: 5989 - RNA, 21 nt, Artificial Sequence
  Sythetic
uggaauuccauccacuuuagc

SEQ ID NO: 5990 - RNA, 22 nt, Artificial Sequence
  Sythetic
cuggaauuccauccacuuuagc

SEQ ID NO: 5991 - RNA, 23 nt, Artificial Sequence
  Sythetic
ucuggaauuccauccacuuuagc

SEQ ID NO: 5992 - RNA, 24 nt, Artificial Sequence
  Sythetic
gucuggaauuccauccacuuuagc

SEQ ID NO: 5993 - RNA, 18 nt, Artificial Sequence
  Sythetic
caaagugacgccgagggc

SEQ ID NO: 5994 - RNA, 19 nt, Artificial Sequence
  Sythetic
gcaaagugacgccgagggc

SEQ ID NO: 5995 - RNA, 20 nt, Artificial Sequence
  Sythetic
agcaaagugacgccgagggc

SEQ ID NO: 5996 - RNA, 21 nt, Artificial Sequence
  Sythetic
uagcaaagugacgccgagggc

SEQ ID NO: 5997 - RNA, 22 nt, Artificial Sequence
  Sythetic
guagcaaagugacgccgagggc

SEQ ID NO: 5998 - RNA, 23 nt, Artificial Sequence
  Sythetic
gguagcaaagugacgccgagggc

SEQ ID NO: 5999 - RNA, 24 nt, Artificial Sequence
  Sythetic
agguagcaaagugacgccgagggc

SEQ ID NO: 6000 - RNA, 21 nt, Artificial Sequence
  Sythetic
gaucuuuacuccuuuuaccuc

SEQ ID NO: 6001 - RNA, 22 nt, Artificial Sequence
  Sythetic
ggaucuuuacuccuuuuaccuc

SEQ ID NO: 6002 - RNA, 23 nt, Artificial Sequence
  Sythetic
aggaucuuuacuccuuuuaccuc

SEQ ID NO: 6003 - RNA, 24 nt, Artificial Sequence
  Sythetic
aaggaucuuuacuccuuuuaccuc

SEQ ID NO: 6004 - RNA, 21 nt, Artificial Sequence
  Sythetic
cuacuguagcauucccagguc

SEQ ID NO: 6005 - RNA, 22 nt, Artificial Sequence
  Sythetic
ucuacuguagcauucccagguc

SEQ ID NO: 6006 - RNA, 23 nt, Artificial Sequence
  Sythetic
cucuacuguagcauucccagguc

SEQ ID NO: 6007 - RNA, 24 nt, Artificial Sequence
  Sythetic
ucucuacuguagcauucccagguc

SEQ ID NO: 6008 - RNA, 18 nt, Artificial Sequence
  Sythetic
ccgaccacccgcaaacag

SEQ ID NO: 6009 - RNA, 19 nt, Artificial Sequence
  Sythetic
accgaccacccgcaaacag

SEQ ID NO: 6010 - RNA, 20 nt, Artificial Sequence
  Sythetic
uaccgaccacccgcaaacag

SEQ ID NO: 6011 - RNA, 21 nt, Artificial Sequence
  Sythetic
cuaccgaccacccgcaaacag

SEQ ID NO: 6012 - RNA, 22 nt, Artificial Sequence
  Sythetic
acuaccgaccacccgcaaacag

SEQ ID NO: 6013 - RNA, 23 nt, Artificial Sequence
  Sythetic
cacuaccgaccacccgcaaacag

SEQ ID NO: 6014 - RNA, 24 nt, Artificial Sequence
  Sythetic
ucacuaccgaccacccgcaaacag

SEQ ID NO: 6015 - RNA, 18 nt, Artificial Sequence
  Sythetic
gcgucugcugaaagcgcg

SEQ ID NO: 6016 - RNA, 19 nt, Artificial Sequence
  Sythetic
ugcgucugcugaaagcgcg

SEQ ID NO: 6017 - RNA, 20 nt, Artificial Sequence
  Sythetic
cugcgucugcugaaagcgcg

SEQ ID NO: 6018 - RNA, 21 nt, Artificial Sequence
  Sythetic
gcugcgucugcugaaagcgcg

SEQ ID NO: 6019 - RNA, 22 nt, Artificial Sequence
  Sythetic
ggcugcgucugcugaaagcgcg

SEQ ID NO: 6020 - RNA, 23 nt, Artificial Sequence
  Sythetic
gggcugcgucugcugaaagcgcg

SEQ ID NO: 6021 - RNA, 24 nt, Artificial Sequence
  Sythetic
ugggcugcgucugcugaaagcgcg

SEQ ID NO: 6022 - RNA, 18 nt, Artificial Sequence
  Sythetic
caugccuauauagugcgg

SEQ ID NO: 6023 - RNA, 19 nt, Artificial Sequence
  Sythetic
ccaugccuauauagugcgg

SEQ ID NO: 6024 - RNA, 20 nt, Artificial Sequence
  Sythetic
accaugccuauauagugcgg

SEQ ID NO: 6025 - RNA, 21 nt, Artificial Sequence
  Sythetic
gaccaugccuauauagugcgg

SEQ ID NO: 6026 - RNA, 22 nt, Artificial Sequence
  Sythetic
ugaccaugccuauauagugcgg

SEQ ID NO: 6027 - RNA, 23 nt, Artificial Sequence
  Sythetic
uugaccaugccuauauagugcgg

SEQ ID NO: 6028 - RNA, 24 nt, Artificial Sequence
  Sythetic
cuugaccaugccuauauagugcgg

SEQ ID NO: 6029 - RNA, 18 nt, Artificial Sequence
  Sythetic
agcauugccgccuacugg

SEQ ID NO: 6030 - RNA, 19 nt, Artificial Sequence
  Sythetic
cagcauugccgccuacugg

SEQ ID NO: 6031 - RNA, 20 nt, Artificial Sequence
  Sythetic
ccagcauugccgccuacugg

SEQ ID NO: 6032 - RNA, 21 nt, Artificial Sequence
  Sythetic
uccagcauugccgccuacugg

SEQ ID NO: 6033 - RNA, 22 nt, Artificial Sequence
  Sythetic
uuccagcauugccgccuacugg

SEQ ID NO: 6034 - RNA, 23 nt, Artificial Sequence
  Sythetic
cuuccagcauugccgccuacugg

SEQ ID NO: 6035 - RNA, 24 nt, Artificial Sequence
  Sythetic
acuuccagcauugccgccuacugg

SEQ ID NO: 6036 - RNA, 21 nt, Artificial Sequence
  Sythetic
aggauuggaaucuuuuucucu

SEQ ID NO: 6037 - RNA, 22 nt, Artificial Sequence
  Sythetic
caggauuggaaucuuuuucucu

SEQ ID NO: 6038 - RNA, 23 nt, Artificial Sequence
  Sythetic
gcaggauuggaaucuuuuucucu

SEQ ID NO: 6039 - RNA, 24 nt, Artificial Sequence
  Sythetic
agcaggauuggaaucuuuuucucu

SEQ ID NO: 6040 - RNA, 18 nt, Artificial Sequence
  Sythetic
ugaccaugccuauauagu

SEQ ID NO: 6041 - RNA, 19 nt, Artificial Sequence
  Sythetic
uugaccaugccuauauagu

SEQ ID NO: 6042 - RNA, 20 nt, Artificial Sequence
  Sythetic
cuugaccaugccuauauagu

SEQ ID NO: 6043 - RNA, 21 nt, Artificial Sequence
  Sythetic
ucuugaccaugccuauauagu

SEQ ID NO: 6044 - RNA, 22 nt, Artificial Sequence
  Sythetic
uucuugaccaugccuauauagu

SEQ ID NO: 6045 - RNA, 23 nt, Artificial Sequence
  Sythetic
uuucuugaccaugccuauauagu

SEQ ID NO: 6046 - RNA, 24 nt, Artificial Sequence
  Sythetic
uuuucuugaccaugccuauauagu

SEQ ID NO: 6047 - RNA, 18 nt, Artificial Sequence
  Sythetic
gcccauucaggagguaaa

SEQ ID NO: 6048 - RNA, 19 nt, Artificial Sequence
  Sythetic
agcccauucaggagguaaa

SEQ ID NO: 6049 - RNA, 20 nt, Artificial Sequence
  Sythetic
cagcccauucaggagguaaa

SEQ ID NO: 6050 - RNA, 18 nt, Artificial Sequence
  Sythetic
cuucucugcacuugugca

SEQ ID NO: 6051 - RNA, 19 nt, Artificial Sequence
  Sythetic
ccuucucugcacuugugca

SEQ ID NO: 6052 - RNA, 20 nt, Artificial Sequence
  Sythetic
gccuucucugcacuugugca

SEQ ID NO: 6053 - RNA, 18 nt, Artificial Sequence
  Sythetic
cauccuugcuaaagugga

SEQ ID NO: 6054 - RNA, 19 nt, Artificial Sequence
  Sythetic
ccauccuugcuaaagugga

SEQ ID NO: 6055 - RNA, 20 nt, Artificial Sequence
  Sythetic
uccauccuugcuaaagugga

SEQ ID NO: 6056 - RNA, 18 nt, Artificial Sequence
  Sythetic
ggaaggggagugacuugc

SEQ ID NO: 6057 - RNA, 19 nt, Artificial Sequence
  Sythetic
gggaaggggagugacuugc

SEQ ID NO: 6058 - RNA, 20 nt, Artificial Sequence
  Sythetic
agggaaggggagugacuugc

SEQ ID NO: 6059 - RNA, 21 nt, Artificial Sequence
  Sythetic
cagggaaggggagugacuugc

SEQ ID NO: 6060 - RNA, 22 nt, Artificial Sequence
  Sythetic
ccagggaaggggagugacuugc

SEQ ID NO: 6061 - RNA, 23 nt, Artificial Sequence
  Sythetic
cccagggaaggggagugacuugc

SEQ ID NO: 6062 - RNA, 24 nt, Artificial Sequence
  Sythetic
gcccagggaaggggagugacuugc

SEQ ID NO: 6063 - RNA, 18 nt, Artificial Sequence
  Sythetic
cacugaggcccagggaag

SEQ ID NO: 6064 - RNA, 19 nt, Artificial Sequence
  Sythetic
acacugaggcccagggaag

SEQ ID NO: 6065 - RNA, 20 nt, Artificial Sequence
  Sythetic
gacacugaggcccagggaag

SEQ ID NO: 6066 - RNA, 21 nt, Artificial Sequence
  Sythetic
agacacugaggcccagggaag

SEQ ID NO: 6067 - RNA, 22 nt, Artificial Sequence
  Sythetic
gagacacugaggcccagggaag

SEQ ID NO: 6068 - RNA, 23 nt, Artificial Sequence
  Sythetic
agagacacugaggcccagggaag

SEQ ID NO: 6069 - RNA, 24 nt, Artificial Sequence
  Sythetic
uagagacacugaggcccagggaag

SEQ ID NO: 6070 - RNA, 18 nt, Artificial Sequence
  Sythetic
uccuaaguuugagggaag

SEQ ID NO: 6071 - RNA, 19 nt, Artificial Sequence
  Sythetic
uuccuaaguuugagggaag

SEQ ID NO: 6072 - RNA, 20 nt, Artificial Sequence
  Sythetic
uuuccuaaguuugagggaag

SEQ ID NO: 6073 - RNA, 21 nt, Artificial Sequence
  Sythetic
auuuccuaaguuugagggaag

SEQ ID NO: 6074 - RNA, 22 nt, Artificial Sequence
  Sythetic
cauuuccuaaguuugagggaag

SEQ ID NO: 6075 - RNA, 23 nt, Artificial Sequence
  Sythetic
gcauuuccuaaguuugagggaag

SEQ ID NO: 6076 - RNA, 24 nt, Artificial Sequence
  Sythetic
ggcauuuccuaaguuugagggaag

SEQ ID NO: 6077 - RNA, 18 nt, Artificial Sequence
  Sythetic
gggcggggagggagaagg

SEQ ID NO: 6078 - RNA, 19 nt, Artificial Sequence
  Sythetic
ggggcggggagggagaagg

SEQ ID NO: 6079 - RNA, 20 nt, Artificial Sequence
  Sythetic
uggggcggggagggagaagg

SEQ ID NO: 6080 - RNA, 21 nt, Artificial Sequence
  Sythetic
cuggggcggggagggagaagg

SEQ ID NO: 6081 - RNA, 22 nt, Artificial Sequence
  Sythetic
gcuggggcggggagggagaagg

SEQ ID NO: 6082 - RNA, 23 nt, Artificial Sequence
  Sythetic
cgcuggggcggggagggagaagg

SEQ ID NO: 6083 - RNA, 24 nt, Artificial Sequence
  Sythetic
ccgcuggggcggggagggagaagg

SEQ ID NO: 6084 - RNA, 18 nt, Artificial Sequence
  Sythetic
ggauggaauuccagaccu

SEQ ID NO: 6085 - RNA, 19 nt, Artificial Sequence
  Sythetic
uggauggaauuccagaccu

SEQ ID NO: 6086 - RNA, 20 nt, Artificial Sequence
  Sythetic
guggauggaauuccagaccu

SEQ ID NO: 6087 - RNA, 21 nt, Artificial Sequence
  Sythetic
aguggauggaauuccagaccu

SEQ ID NO: 6088 - RNA, 22 nt, Artificial Sequence
  Sythetic
aaguggauggaauuccagaccu

SEQ ID NO: 6089 - RNA, 23 nt, Artificial Sequence
  Sythetic
aaaguggauggaauuccagaccu

SEQ ID NO: 6090 - RNA, 24 nt, Artificial Sequence
  Sythetic
uaaaguggauggaauuccagaccu

SEQ ID NO: 6091 - RNA, 18 nt, Artificial Sequence
  Sythetic
gugacccuuuuuuggagu

SEQ ID NO: 6092 - RNA, 19 nt, Artificial Sequence
  Sythetic
ggugacccuuuuuuggagu

SEQ ID NO: 6093 - RNA, 20 nt, Artificial Sequence
  Sythetic
cggugacccuuuuuuggagu

SEQ ID NO: 6094 - RNA, 18 nt, Artificial Sequence
  Sythetic
caggggacccugcuguuu

SEQ ID NO: 6095 - RNA, 19 nt, Artificial Sequence
  Sythetic
ccaggggacccugcuguuu

SEQ ID NO: 6096 - RNA, 20 nt, Artificial Sequence
  Sythetic
cccaggggacccugcuguuu

SEQ ID NO: 6097 - RNA, 21 nt, Artificial Sequence
  Sythetic
gcccaggggacccugcuguuu

SEQ ID NO: 6098 - RNA, 22 nt, Artificial Sequence
  Sythetic
agcccaggggacccugcuguuu

SEQ ID NO: 6099 - RNA, 23 nt, Artificial Sequence
  Sythetic
aagcccaggggacccugcuguuu

SEQ ID NO: 6100 - RNA, 24 nt, Artificial Sequence
  Sythetic
gaagcccaggggacccugcuguuu

SEQ ID NO: 6101 - RNA, 18 nt, Artificial Sequence
  Sythetic
accagcgguuaccaugga

SEQ ID NO: 6102 - RNA, 19 nt, Artificial Sequence
  Sythetic
aaccagcgguuaccaugga

SEQ ID NO: 6103 - RNA, 20 nt, Artificial Sequence
  Sythetic
gaaccagcgguuaccaugga

SEQ ID NO: 6104 - RNA, 18 nt, Artificial Sequence
  Sythetic
cuuuacuccuuuuaccuc

SEQ ID NO: 6105 - RNA, 19 nt, Artificial Sequence
  Sythetic
ucuuuacuccuuuuaccuc

SEQ ID NO: 6106 - RNA, 20 nt, Artificial Sequence
  Sythetic
aucuuuacuccuuuuaccuc

SEQ ID NO: 6107 - RNA, 18 nt, Artificial Sequence
  Sythetic
cuguagcauucccagguc

SEQ ID NO: 6108 - RNA, 19 nt, Artificial Sequence
  Sythetic
acuguagcauucccagguc

SEQ ID NO: 6109 - RNA, 20 nt, Artificial Sequence
  Sythetic
uacuguagcauucccagguc

SEQ ID NO: 6110 - RNA, 18 nt, Artificial Sequence
  Sythetic
ggguggguggggggggag

SEQ ID NO: 6111 - RNA, 19 nt, Artificial Sequence
  Sythetic
cggguggguggggggggag

SEQ ID NO: 6112 - RNA, 20 nt, Artificial Sequence
  Sythetic
gcggguggguggggggggag

SEQ ID NO: 6113 - RNA, 21 nt, Artificial Sequence
  Sythetic
ugcggguggguggggggggag

SEQ ID NO: 6114 - RNA, 22 nt, Artificial Sequence
  Sythetic
gugcggguggguggggggggag

SEQ ID NO: 6115 - RNA, 23 nt, Artificial Sequence
  Sythetic
agugcggguggguggggggggag

SEQ ID NO: 6116 - RNA, 24 nt, Artificial Sequence
  Sythetic
uagugcggguggguggggggggag

SEQ ID NO: 6117 - RNA, 18 nt, Artificial Sequence
  Sythetic
guggggggggagcaggau

SEQ ID NO: 6118 - RNA, 19 nt, Artificial Sequence
  Sythetic
gguggggggggagcaggau

SEQ ID NO: 6119 - RNA, 20 nt, Artificial Sequence
  Sythetic
ggguggggggggagcaggau

SEQ ID NO: 6120 - RNA, 21 nt, Artificial Sequence
  Sythetic
uggguggggggggagcaggau

SEQ ID NO: 6121 - RNA, 22 nt, Artificial Sequence
  Sythetic
guggguggggggggagcaggau

SEQ ID NO: 6122 - RNA, 23 nt, Artificial Sequence
  Sythetic
gguggguggggggggagcaggau

SEQ ID NO: 6123 - RNA, 24 nt, Artificial Sequence
  Sythetic
ggguggguggggggggagcaggau

SEQ ID NO: 6124 - RNA, 18 nt, Artificial Sequence
  Sythetic
auuggaaucuuuuucucu

SEQ ID NO: 6125 - RNA, 19 nt, Artificial Sequence
  Sythetic
gauuggaaucuuuuucucu

SEQ ID NO: 6126 - RNA, 20 nt, Artificial Sequence
  Sythetic
ggauuggaaucuuuuucucu

SEQ ID NO: 6127 - RNA, 18 nt, Artificial Sequence
  Sythetic
gcugccgcagccaacaaa

SEQ ID NO: 6128 - RNA, 19 nt, Artificial Sequence
  Sythetic
ugcugccgcagccaacaaa

SEQ ID NO: 6129 - RNA, 20 nt, Artificial Sequence
  Sythetic
cugcugccgcagccaacaaa

SEQ ID NO: 6130 - RNA, 21 nt, Artificial Sequence
  Sythetic
ccugcugccgcagccaacaaa

SEQ ID NO: 6131 - RNA, 22 nt, Artificial Sequence
  Sythetic
accugcugccgcagccaacaaa

SEQ ID NO: 6132 - RNA, 23 nt, Artificial Sequence
  Sythetic
uaccugcugccgcagccaacaaa

SEQ ID NO: 6133 - RNA, 24 nt, Artificial Sequence
  Sythetic
cuaccugcugccgcagccaacaaa

SEQ ID NO: 6134 - RNA, 18 nt, Artificial Sequence
  Sythetic
ugacaaagcagguugaaa

SEQ ID NO: 6135 - RNA, 19 nt, Artificial Sequence
  Sythetic
augacaaagcagguugaaa

SEQ ID NO: 6136 - RNA, 20 nt, Artificial Sequence
  Sythetic
uaugacaaagcagguugaaa

SEQ ID NO: 6137 - RNA, 21 nt, Artificial Sequence
  Sythetic
uuaugacaaagcagguugaaa

SEQ ID NO: 6138 - RNA, 22 nt, Artificial Sequence
  Sythetic
uuuaugacaaagcagguugaaa

SEQ ID NO: 6139 - RNA, 23 nt, Artificial Sequence
  Sythetic
auuuaugacaaagcagguugaaa

SEQ ID NO: 6140 - RNA, 24 nt, Artificial Sequence
  Sythetic
cauuuaugacaaagcagguugaaa

SEQ ID NO: 6141 - RNA, 18 nt, Artificial Sequence
  Sythetic
gcgcgcggcgggacucaa

SEQ ID NO: 6142 - RNA, 19 nt, Artificial Sequence
  Sythetic
cgcgcgcggcgggacucaa

SEQ ID NO: 6143 - RNA, 20 nt, Artificial Sequence
  Sythetic
ccgcgcgcggcgggacucaa

SEQ ID NO: 6144 - RNA, 21 nt, Artificial Sequence
  Sythetic
gccgcgcgcggcgggacucaa

SEQ ID NO: 6145 - RNA, 22 nt, Artificial Sequence
  Sythetic
cgccgcgcgcggcgggacucaa

SEQ ID NO: 6146 - RNA, 23 nt, Artificial Sequence
  Sythetic
ccgccgcgcgcggcgggacucaa

SEQ ID NO: 6147 - RNA, 24 nt, Artificial Sequence
  Sythetic
gccgccgcgcgcggcgggacucaa

SEQ ID NO: 6148 - RNA, 18 nt, Artificial Sequence
  Sythetic
acacugaggcccagggaa

SEQ ID NO: 6149 - RNA, 19 nt, Artificial Sequence
  Sythetic
gacacugaggcccagggaa

SEQ ID NO: 6150 - RNA, 20 nt, Artificial Sequence
  Sythetic
agacacugaggcccagggaa

SEQ ID NO: 6151 - RNA, 21 nt, Artificial Sequence
  Sythetic
gagacacugaggcccagggaa

SEQ ID NO: 6152 - RNA, 22 nt, Artificial Sequence
  Sythetic
agagacacugaggcccagggaa

SEQ ID NO: 6153 - RNA, 23 nt, Artificial Sequence
  Sythetic
uagagacacugaggcccagggaa

SEQ ID NO: 6154 - RNA, 24 nt, Artificial Sequence
  Sythetic
guagagacacugaggcccagggaa

SEQ ID NO: 6155 - RNA, 18 nt, Artificial Sequence
  Sythetic
uuccuaaguuugagggaa

SEQ ID NO: 6156 - RNA, 19 nt, Artificial Sequence
  Sythetic
uuuccuaaguuugagggaa

SEQ ID NO: 6157 - RNA, 20 nt, Artificial Sequence
  Sythetic
auuuccuaaguuugagggaa

SEQ ID NO: 6158 - RNA, 21 nt, Artificial Sequence
  Sythetic
cauuuccuaaguuugagggaa

SEQ ID NO: 6159 - RNA, 22 nt, Artificial Sequence
  Sythetic
gcauuuccuaaguuugagggaa

SEQ ID NO: 6160 - RNA, 23 nt, Artificial Sequence
  Sythetic
ggcauuuccuaaguuugagggaa

SEQ ID NO: 6161 - RNA, 24 nt, Artificial Sequence
  Sythetic
aggcauuuccuaaguuugagggaa

SEQ ID NO: 6162 - RNA, 18 nt, Artificial Sequence
  Sythetic
agcccauucaggagguaa

SEQ ID NO: 6163 - RNA, 19 nt, Artificial Sequence
  Sythetic
cagcccauucaggagguaa

SEQ ID NO: 6164 - RNA, 20 nt, Artificial Sequence
  Sythetic
gcagcccauucaggagguaa

SEQ ID NO: 6165 - RNA, 21 nt, Artificial Sequence
  Sythetic
cgcagcccauucaggagguaa

SEQ ID NO: 6166 - RNA, 22 nt, Artificial Sequence
  Sythetic
acgcagcccauucaggagguaa

SEQ ID NO: 6167 - RNA, 23 nt, Artificial Sequence
  Sythetic
gacgcagcccauucaggagguaa

SEQ ID NO: 6168 - RNA, 24 nt, Artificial Sequence
  Sythetic
agacgcagcccauucaggagguaa

SEQ ID NO: 6169 - RNA, 18 nt, Artificial Sequence
  Sythetic
guuucuccucgacucaca

SEQ ID NO: 6170 - RNA, 19 nt, Artificial Sequence
  Sythetic
cguuucuccucgacucaca

SEQ ID NO: 6171 - RNA, 20 nt, Artificial Sequence
  Sythetic
ucguuucuccucgacucaca

SEQ ID NO: 6172 - RNA, 21 nt, Artificial Sequence
  Sythetic
gucguuucuccucgacucaca

SEQ ID NO: 6173 - RNA, 22 nt, Artificial Sequence
  Sythetic
agucguuucuccucgacucaca

SEQ ID NO: 6174 - RNA, 23 nt, Artificial Sequence
  Sythetic
cagucguuucuccucgacucaca

SEQ ID NO: 6175 - RNA, 24 nt, Artificial Sequence
  Sythetic
ccagucguuucuccucgacucaca

SEQ ID NO: 6176 - RNA, 18 nt, Artificial Sequence
  Sythetic
aaugcuacaguagagaca

SEQ ID NO: 6177 - RNA, 19 nt, Artificial Sequence
  Sythetic
gaaugcuacaguagagaca

SEQ ID NO: 6178 - RNA, 20 nt, Artificial Sequence
  Sythetic
ggaaugcuacaguagagaca

SEQ ID NO: 6179 - RNA, 21 nt, Artificial Sequence
  Sythetic
gggaaugcuacaguagagaca

SEQ ID NO: 6180 - RNA, 22 nt, Artificial Sequence
  Sythetic
ugggaaugcuacaguagagaca

SEQ ID NO: 6181 - RNA, 23 nt, Artificial Sequence
  Sythetic
cugggaaugcuacaguagagaca

SEQ ID NO: 6182 - RNA, 24 nt, Artificial Sequence
  Sythetic
ccugggaaugcuacaguagagaca

SEQ ID NO: 6183 - RNA, 18 nt, Artificial Sequence
  Sythetic
cgcggcuugggaagccca

SEQ ID NO: 6184 - RNA, 19 nt, Artificial Sequence
  Sythetic
gcgcggcuugggaagccca

SEQ ID NO: 6185 - RNA, 20 nt, Artificial Sequence
  Sythetic
ugcgcggcuugggaagccca

SEQ ID NO: 6186 - RNA, 21 nt, Artificial Sequence
  Sythetic
gugcgcggcuugggaagccca

SEQ ID NO: 6187 - RNA, 22 nt, Artificial Sequence
  Sythetic
ggugcgcggcuugggaagccca

SEQ ID NO: 6188 - RNA, 23 nt, Artificial Sequence
  Sythetic
aggugcgcggcuugggaagccca

SEQ ID NO: 6189 - RNA, 24 nt, Artificial Sequence
  Sythetic
gaggugcgcggcuugggaagccca

SEQ ID NO: 6190 - RNA, 18 nt, Artificial Sequence
  Sythetic
uagagacacugaggccca

SEQ ID NO: 6191 - RNA, 19 nt, Artificial Sequence
  Sythetic
guagagacacugaggccca

SEQ ID NO: 6192 - RNA, 20 nt, Artificial Sequence
  Sythetic
aguagagacacugaggccca

SEQ ID NO: 6193 - RNA, 21 nt, Artificial Sequence
  Sythetic
caguagagacacugaggccca

SEQ ID NO: 6194 - RNA, 22 nt, Artificial Sequence
  Sythetic
acaguagagacacugaggccca

SEQ ID NO: 6195 - RNA, 23 nt, Artificial Sequence
  Sythetic
uacaguagagacacugaggccca

SEQ ID NO: 6196 - RNA, 24 nt, Artificial Sequence
  Sythetic
cuacaguagagacacugaggccca

SEQ ID NO: 6197 - RNA, 18 nt, Artificial Sequence
  Sythetic
gggagacacaugcagcca

SEQ ID NO: 6198 - RNA, 19 nt, Artificial Sequence
  Sythetic
ggggagacacaugcagcca

SEQ ID NO: 6199 - RNA, 20 nt, Artificial Sequence
  Sythetic
gggggagacacaugcagcca

SEQ ID NO: 6200 - RNA, 21 nt, Artificial Sequence
  Sythetic
agggggagacacaugcagcca

SEQ ID NO: 6201 - RNA, 22 nt, Artificial Sequence
  Sythetic
aagggggagacacaugcagcca

SEQ ID NO: 6202 - RNA, 23 nt, Artificial Sequence
  Sythetic
caagggggagacacaugcagcca

SEQ ID NO: 6203 - RNA, 24 nt, Artificial Sequence
  Sythetic
ucaagggggagacacaugcagcca

SEQ ID NO: 6204 - RNA, 18 nt, Artificial Sequence
  Sythetic
ucguuucuccucgacuca

SEQ ID NO: 6205 - RNA, 19 nt, Artificial Sequence
  Sythetic
gucguuucuccucgacuca

SEQ ID NO: 6206 - RNA, 20 nt, Artificial Sequence
  Sythetic
agucguuucuccucgacuca

SEQ ID NO: 6207 - RNA, 21 nt, Artificial Sequence
  Sythetic
cagucguuucuccucgacuca

SEQ ID NO: 6208 - RNA, 22 nt, Artificial Sequence
  Sythetic
ccagucguuucuccucgacuca

SEQ ID NO: 6209 - RNA, 23 nt, Artificial Sequence
  Sythetic
uccagucguuucuccucgacuca

SEQ ID NO: 6210 - RNA, 24 nt, Artificial Sequence
  Sythetic
uuccagucguuucuccucgacuca

SEQ ID NO: 6211 - RNA, 18 nt, Artificial Sequence
  Sythetic
cgcgcgcggcgggacuca

SEQ ID NO: 6212 - RNA, 19 nt, Artificial Sequence
  Sythetic
ccgcgcgcggcgggacuca

SEQ ID NO: 6213 - RNA, 20 nt, Artificial Sequence
  Sythetic
gccgcgcgcggcgggacuca

SEQ ID NO: 6214 - RNA, 21 nt, Artificial Sequence
  Sythetic
cgccgcgcgcggcgggacuca

SEQ ID NO: 6215 - RNA, 22 nt, Artificial Sequence
  Sythetic
ccgccgcgcgcggcgggacuca

SEQ ID NO: 6216 - RNA, 23 nt, Artificial Sequence
  Sythetic
gccgccgcgcgcggcgggacuca

SEQ ID NO: 6217 - RNA, 24 nt, Artificial Sequence
  Sythetic
agccgccgcgcgcggcgggacuca

SEQ ID NO: 6218 - RNA, 18 nt, Artificial Sequence
  Sythetic
gaggggcagacgcgagga

SEQ ID NO: 6219 - RNA, 19 nt, Artificial Sequence
  Sythetic
agaggggcagacgcgagga

SEQ ID NO: 6220 - RNA, 20 nt, Artificial Sequence
  Sythetic
gagaggggcagacgcgagga

SEQ ID NO: 6221 - RNA, 21 nt, Artificial Sequence
  Sythetic
ggagaggggcagacgcgagga

SEQ ID NO: 6222 - RNA, 22 nt, Artificial Sequence
  Sythetic
gggagaggggcagacgcgagga

SEQ ID NO: 6223 - RNA, 23 nt, Artificial Sequence
  Sythetic
ggggagaggggcagacgcgagga

SEQ ID NO: 6224 - RNA, 24 nt, Artificial Sequence
  Sythetic
gggggagaggggcagacgcgagga

SEQ ID NO: 6225 - RNA, 18 nt, Artificial Sequence
  Sythetic
agugaguccggagccgga

SEQ ID NO: 6226 - RNA, 19 nt, Artificial Sequence
  Sythetic
uagugaguccggagccgga

SEQ ID NO: 6227 - RNA, 20 nt, Artificial Sequence
  Sythetic
guagugaguccggagccgga

SEQ ID NO: 6228 - RNA, 21 nt, Artificial Sequence
  Sythetic
gguagugaguccggagccgga

SEQ ID NO: 6229 - RNA, 22 nt, Artificial Sequence
  Sythetic
cgguagugaguccggagccgga

SEQ ID NO: 6230 - RNA, 23 nt, Artificial Sequence
  Sythetic
ucgguagugaguccggagccgga

SEQ ID NO: 6231 - RNA, 24 nt, Artificial Sequence
  Sythetic
gucgguagugaguccggagccgga

SEQ ID NO: 6232 - RNA, 18 nt, Artificial Sequence
  Sythetic
cgcuucugcccgcucgga

SEQ ID NO: 6233 - RNA, 19 nt, Artificial Sequence
  Sythetic
ccgcuucugcccgcucgga

SEQ ID NO: 6234 - RNA, 20 nt, Artificial Sequence
  Sythetic
gccgcuucugcccgcucgga

SEQ ID NO: 6235 - RNA, 21 nt, Artificial Sequence
  Sythetic
ggccgcuucugcccgcucgga

SEQ ID NO: 6236 - RNA, 22 nt, Artificial Sequence
  Sythetic
uggccgcuucugcccgcucgga

SEQ ID NO: 6237 - RNA, 23 nt, Artificial Sequence
  Sythetic
cuggccgcuucugcccgcucgga

SEQ ID NO: 6238 - RNA, 24 nt, Artificial Sequence
  Sythetic
ccuggccgcuucugcccgcucgga

SEQ ID NO: 6239 - RNA, 18 nt, Artificial Sequence
  Sythetic
gacacugaggcccaggga

SEQ ID NO: 6240 - RNA, 19 nt, Artificial Sequence
  Sythetic
agacacugaggcccaggga

SEQ ID NO: 6241 - RNA, 20 nt, Artificial Sequence
  Sythetic
gagacacugaggcccaggga

SEQ ID NO: 6242 - RNA, 21 nt, Artificial Sequence
  Sythetic
agagacacugaggcccaggga

SEQ ID NO: 6243 - RNA, 22 nt, Artificial Sequence
  Sythetic
uagagacacugaggcccaggga

SEQ ID NO: 6244 - RNA, 23 nt, Artificial Sequence
  Sythetic
guagagacacugaggcccaggga

SEQ ID NO: 6245 - RNA, 24 nt, Artificial Sequence
  Sythetic
aguagagacacugaggcccaggga

SEQ ID NO: 6246 - RNA, 18 nt, Artificial Sequence
  Sythetic
gcgccgcuggggcgggga

SEQ ID NO: 6247 - RNA, 19 nt, Artificial Sequence
  Sythetic
ugcgccgcuggggcgggga

SEQ ID NO: 6248 - RNA, 20 nt, Artificial Sequence
  Sythetic
augcgccgcuggggcgggga

SEQ ID NO: 6249 - RNA, 21 nt, Artificial Sequence
  Sythetic
caugcgccgcuggggcgggga

SEQ ID NO: 6250 - RNA, 22 nt, Artificial Sequence
  Sythetic
gcaugcgccgcuggggcgggga

SEQ ID NO: 6251 - RNA, 23 nt, Artificial Sequence
  Sythetic
cgcaugcgccgcuggggcgggga

SEQ ID NO: 6252 - RNA, 24 nt, Artificial Sequence
  Sythetic
gcgcaugcgccgcuggggcgggga

SEQ ID NO: 6253 - RNA, 18 nt, Artificial Sequence
  Sythetic
agaaggcgggguggggga

SEQ ID NO: 6254 - RNA, 19 nt, Artificial Sequence
  Sythetic
gagaaggcgggguggggga

SEQ ID NO: 6255 - RNA, 20 nt, Artificial Sequence
  Sythetic
ggagaaggcgggguggggga

SEQ ID NO: 6256 - RNA, 21 nt, Artificial Sequence
  Sythetic
gggagaaggcgggguggggga

SEQ ID NO: 6257 - RNA, 22 nt, Artificial Sequence
  Sythetic
agggagaaggcgggguggggga

SEQ ID NO: 6258 - RNA, 23 nt, Artificial Sequence
  Sythetic
gagggagaaggcgggguggggga

SEQ ID NO: 6259 - RNA, 24 nt, Artificial Sequence
  Sythetic
ggagggagaaggcgggguggggga

SEQ ID NO: 6260 - RNA, 18 nt, Artificial Sequence
  Sythetic
ggcauuuccuaaguuuga

SEQ ID NO: 6261 - RNA, 19 nt, Artificial Sequence
  Sythetic
aggcauuuccuaaguuuga

SEQ ID NO: 6262 - RNA, 20 nt, Artificial Sequence
  Sythetic
gaggcauuuccuaaguuuga

SEQ ID NO: 6263 - RNA, 21 nt, Artificial Sequence
  Sythetic
agaggcauuuccuaaguuuga

SEQ ID NO: 6264 - RNA, 22 nt, Artificial Sequence
  Sythetic
cagaggcauuuccuaaguuuga

SEQ ID NO: 6265 - RNA, 23 nt, Artificial Sequence
  Sythetic
ccagaggcauuuccuaaguuuga

SEQ ID NO: 6266 - RNA, 24 nt, Artificial Sequence
  Sythetic
cccagaggcauuuccuaaguuuga

SEQ ID NO: 6267 - RNA, 18 nt, Artificial Sequence
  Sythetic
cuccagaugcgguggcua

SEQ ID NO: 6268 - RNA, 19 nt, Artificial Sequence
  Sythetic
ucuccagaugcgguggcua

SEQ ID NO: 6269 - RNA, 20 nt, Artificial Sequence
  Sythetic
uucuccagaugcgguggcua

SEQ ID NO: 6270 - RNA, 21 nt, Artificial Sequence
  Sythetic
guucuccagaugcgguggcua

SEQ ID NO: 6271 - RNA, 22 nt, Artificial Sequence
  Sythetic
gguucuccagaugcgguggcua

SEQ ID NO: 6272 - RNA, 23 nt, Artificial Sequence
  Sythetic
ugguucuccagaugcgguggcua

SEQ ID NO: 6273 - RNA, 24 nt, Artificial Sequence
  Sythetic
cugguucuccagaugcgguggcua

SEQ ID NO: 6274 - RNA, 18 nt, Artificial Sequence
  Sythetic
ggagacacaugcagccac

SEQ ID NO: 6275 - RNA, 19 nt, Artificial Sequence
  Sythetic
gggagacacaugcagccac

SEQ ID NO: 6276 - RNA, 20 nt, Artificial Sequence
  Sythetic
ggggagacacaugcagccac

SEQ ID NO: 6277 - RNA, 21 nt, Artificial Sequence
  Sythetic
gggggagacacaugcagccac

SEQ ID NO: 6278 - RNA, 22 nt, Artificial Sequence
  Sythetic
agggggagacacaugcagccac

SEQ ID NO: 6279 - RNA, 23 nt, Artificial Sequence
  Sythetic
aagggggagacacaugcagccac

SEQ ID NO: 6280 - RNA, 24 nt, Artificial Sequence
  Sythetic
caagggggagacacaugcagccac

SEQ ID NO: 6281 - RNA, 18 nt, Artificial Sequence
  Sythetic
guggauggaauuccagac

SEQ ID NO: 6282 - RNA, 19 nt, Artificial Sequence
  Sythetic
aguggauggaauuccagac

SEQ ID NO: 6283 - RNA, 20 nt, Artificial Sequence
  Sythetic
aaguggauggaauuccagac

SEQ ID NO: 6284 - RNA, 21 nt, Artificial Sequence
  Sythetic
aaaguggauggaauuccagac

SEQ ID NO: 6285 - RNA, 22 nt, Artificial Sequence
  Sythetic
uaaaguggauggaauuccagac

SEQ ID NO: 6286 - RNA, 23 nt, Artificial Sequence
  Sythetic
cuaaaguggauggaauuccagac

SEQ ID NO: 6287 - RNA, 24 nt, Artificial Sequence
  Sythetic
gcuaaaguggauggaauuccagac

SEQ ID NO: 6288 - RNA, 18 nt, Artificial Sequence
  Sythetic
ugggggagaggggcagac

SEQ ID NO: 6289 - RNA, 19 nt, Artificial Sequence
  Sythetic
gugggggagaggggcagac

SEQ ID NO: 6290 - RNA, 20 nt, Artificial Sequence
  Sythetic
ggugggggagaggggcagac

SEQ ID NO: 6291 - RNA, 21 nt, Artificial Sequence
  Sythetic
gggugggggagaggggcagac

SEQ ID NO: 6292 - RNA, 22 nt, Artificial Sequence
  Sythetic
ggggugggggagaggggcagac

SEQ ID NO: 6293 - RNA, 23 nt, Artificial Sequence
  Sythetic
cggggugggggagaggggcagac

SEQ ID NO: 6294 - RNA, 24 nt, Artificial Sequence
  Sythetic
gcggggugggggagaggggcagac

SEQ ID NO: 6295 - RNA, 18 nt, Artificial Sequence
  Sythetic
uccagaugcgguggcuac

SEQ ID NO: 6296 - RNA, 19 nt, Artificial Sequence
  Sythetic
cuccagaugcgguggcuac

SEQ ID NO: 6297 - RNA, 20 nt, Artificial Sequence
  Sythetic
ucuccagaugcgguggcuac

SEQ ID NO: 6298 - RNA, 21 nt, Artificial Sequence
  Sythetic
uucuccagaugcgguggcuac

SEQ ID NO: 6299 - RNA, 22 nt, Artificial Sequence
  Sythetic
guucuccagaugcgguggcuac

SEQ ID NO: 6300 - RNA, 23 nt, Artificial Sequence
  Sythetic
gguucuccagaugcgguggcuac

SEQ ID NO: 6301 - RNA, 24 nt, Artificial Sequence
  Sythetic
ugguucuccagaugcgguggcuac

SEQ ID NO: 6302 - RNA, 18 nt, Artificial Sequence
  Sythetic
uggauggaauuccagacc

SEQ ID NO: 6303 - RNA, 19 nt, Artificial Sequence
  Sythetic
guggauggaauuccagacc

SEQ ID NO: 6304 - RNA, 20 nt, Artificial Sequence
  Sythetic
aguggauggaauuccagacc

SEQ ID NO: 6305 - RNA, 21 nt, Artificial Sequence
  Sythetic
aaguggauggaauuccagacc

SEQ ID NO: 6306 - RNA, 22 nt, Artificial Sequence
  Sythetic
aaaguggauggaauuccagacc

SEQ ID NO: 6307 - RNA, 23 nt, Artificial Sequence
  Sythetic
uaaaguggauggaauuccagacc

SEQ ID NO: 6308 - RNA, 24 nt, Artificial Sequence
  Sythetic
cuaaaguggauggaauuccagacc

SEQ ID NO: 6309 - RNA, 18 nt, Artificial Sequence
  Sythetic
gcgcggcuugggaagccc

SEQ ID NO: 6310 - RNA, 19 nt, Artificial Sequence
  Sythetic
ugcgcggcuugggaagccc

SEQ ID NO: 6311 - RNA, 20 nt, Artificial Sequence
  Sythetic
gugcgcggcuugggaagccc

SEQ ID NO: 6312 - RNA, 21 nt, Artificial Sequence
  Sythetic
ggugcgcggcuugggaagccc

SEQ ID NO: 6313 - RNA, 22 nt, Artificial Sequence
  Sythetic
aggugcgcggcuugggaagccc

SEQ ID NO: 6314 - RNA, 23 nt, Artificial Sequence
  Sythetic
gaggugcgcggcuugggaagccc

SEQ ID NO: 6315 - RNA, 24 nt, Artificial Sequence
  Sythetic
agaggugcgcggcuugggaagccc

SEQ ID NO: 6316 - RNA, 18 nt, Artificial Sequence
  Sythetic
guagagacacugaggccc

SEQ ID NO: 6317 - RNA, 19 nt, Artificial Sequence
  Sythetic
aguagagacacugaggccc

SEQ ID NO: 6318 - RNA, 20 nt, Artificial Sequence
  Sythetic
caguagagacacugaggccc

SEQ ID NO: 6319 - RNA, 21 nt, Artificial Sequence
  Sythetic
acaguagagacacugaggccc

SEQ ID NO: 6320 - RNA, 22 nt, Artificial Sequence
  Sythetic
uacaguagagacacugaggccc

SEQ ID NO: 6321 - RNA, 23 nt, Artificial Sequence
  Sythetic
cuacaguagagacacugaggccc

SEQ ID NO: 6322 - RNA, 24 nt, Artificial Sequence
  Sythetic
gcuacaguagagacacugaggccc

SEQ ID NO: 6323 - RNA, 18 nt, Artificial Sequence
  Sythetic
ugcgcggcuugggaagcc

SEQ ID NO: 6324 - RNA, 19 nt, Artificial Sequence
  Sythetic
gugcgcggcuugggaagcc

SEQ ID NO: 6325 - RNA, 20 nt, Artificial Sequence
  Sythetic
ggugcgcggcuugggaagcc

SEQ ID NO: 6326 - RNA, 21 nt, Artificial Sequence
  Sythetic
aggugcgcggcuugggaagcc

SEQ ID NO: 6327 - RNA, 22 nt, Artificial Sequence
  Sythetic
gaggugcgcggcuugggaagcc

SEQ ID NO: 6328 - RNA, 23 nt, Artificial Sequence
  Sythetic
agaggugcgcggcuugggaagcc

SEQ ID NO: 6329 - RNA, 24 nt, Artificial Sequence
  Sythetic
gagaggugcgcggcuugggaagcc

SEQ ID NO: 6330 - RNA, 18 nt, Artificial Sequence
  Sythetic
aguagagacacugaggcc

SEQ ID NO: 6331 - RNA, 19 nt, Artificial Sequence
  Sythetic
caguagagacacugaggcc

SEQ ID NO: 6332 - RNA, 20 nt, Artificial Sequence
  Sythetic
acaguagagacacugaggcc

SEQ ID NO: 6333 - RNA, 21 nt, Artificial Sequence
  Sythetic
uacaguagagacacugaggcc

SEQ ID NO: 6334 - RNA, 22 nt, Artificial Sequence
  Sythetic
cuacaguagagacacugaggcc

SEQ ID NO: 6335 - RNA, 23 nt, Artificial Sequence
  Sythetic
gcuacaguagagacacugaggcc

SEQ ID NO: 6336 - RNA, 24 nt, Artificial Sequence
  Sythetic
ugcuacaguagagacacugaggcc

SEQ ID NO: 6337 - RNA, 18 nt, Artificial Sequence
  Sythetic
gagccggacaggaccucc

SEQ ID NO: 6338 - RNA, 19 nt, Artificial Sequence
  Sythetic
ggagccggacaggaccucc

SEQ ID NO: 6339 - RNA, 20 nt, Artificial Sequence
  Sythetic
cggagccggacaggaccucc

SEQ ID NO: 6340 - RNA, 21 nt, Artificial Sequence
  Sythetic
ccggagccggacaggaccucc

SEQ ID NO: 6341 - RNA, 22 nt, Artificial Sequence
  Sythetic
uccggagccggacaggaccucc

SEQ ID NO: 6342 - RNA, 23 nt, Artificial Sequence
  Sythetic
guccggagccggacaggaccucc

SEQ ID NO: 6343 - RNA, 24 nt, Artificial Sequence
  Sythetic
aguccggagccggacaggaccucc

SEQ ID NO: 6344 - RNA, 18 nt, Artificial Sequence
  Sythetic
ugaagacaggugggaagc

SEQ ID NO: 6345 - RNA, 19 nt, Artificial Sequence
  Sythetic
cugaagacaggugggaagc

SEQ ID NO: 6346 - RNA, 20 nt, Artificial Sequence
  Sythetic
ccugaagacaggugggaagc

SEQ ID NO: 6347 - RNA, 21 nt, Artificial Sequence
  Sythetic
gccugaagacaggugggaagc

SEQ ID NO: 6348 - RNA, 22 nt, Artificial Sequence
  Sythetic
cgccugaagacaggugggaagc

SEQ ID NO: 6349 - RNA, 23 nt, Artificial Sequence
  Sythetic
gcgccugaagacaggugggaagc

SEQ ID NO: 6350 - RNA, 24 nt, Artificial Sequence
  Sythetic
ugcgccugaagacaggugggaagc

SEQ ID NO: 6351 - RNA, 18 nt, Artificial Sequence
  Sythetic
ggggagaggggcagacgc

SEQ ID NO: 6352 - RNA, 19 nt, Artificial Sequence
  Sythetic
gggggagaggggcagacgc

SEQ ID NO: 6353 - RNA, 20 nt, Artificial Sequence
  Sythetic
ugggggagaggggcagacgc

SEQ ID NO: 6354 - RNA, 21 nt, Artificial Sequence
  Sythetic
gugggggagaggggcagacgc

SEQ ID NO: 6355 - RNA, 22 nt, Artificial Sequence
  Sythetic
ggugggggagaggggcagacgc

SEQ ID NO: 6356 - RNA, 23 nt, Artificial Sequence
  Sythetic
gggugggggagaggggcagacgc

SEQ ID NO: 6357 - RNA, 24 nt, Artificial Sequence
  Sythetic
ggggugggggagaggggcagacgc

SEQ ID NO: 6358 - RNA, 18 nt, Artificial Sequence
  Sythetic
cuggccgcuucugcccgc

SEQ ID NO: 6359 - RNA, 19 nt, Artificial Sequence
  Sythetic
ccuggccgcuucugcccgc

SEQ ID NO: 6360 - RNA, 20 nt, Artificial Sequence
  Sythetic
uccuggccgcuucugcccgc

SEQ ID NO: 6361 - RNA, 21 nt, Artificial Sequence
  Sythetic
guccuggccgcuucugcccgc

SEQ ID NO: 6362 - RNA, 22 nt, Artificial Sequence
  Sythetic
uguccuggccgcuucugcccgc

SEQ ID NO: 6363 - RNA, 23 nt, Artificial Sequence
  Sythetic
auguccuggccgcuucugcccgc

SEQ ID NO: 6364 - RNA, 24 nt, Artificial Sequence
  Sythetic
aauguccuggccgcuucugcccgc

SEQ ID NO: 6365 - RNA, 18 nt, Artificial Sequence
  Sythetic
gcgcggcgcaugcgccgc

SEQ ID NO: 6366 - RNA, 19 nt, Artificial Sequence
  Sythetic
agcgcggcgcaugcgccgc

SEQ ID NO: 6367 - RNA, 20 nt, Artificial Sequence
  Sythetic
gagcgcggcgcaugcgccgc

SEQ ID NO: 6368 - RNA, 21 nt, Artificial Sequence
  Sythetic
cgagcgcggcgcaugcgccgc

SEQ ID NO: 6369 - RNA, 22 nt, Artificial Sequence
  Sythetic
ccgagcgcggcgcaugcgccgc

SEQ ID NO: 6370 - RNA, 23 nt, Artificial Sequence
  Sythetic
uccgagcgcggcgcaugcgccgc

SEQ ID NO: 6371 - RNA, 24 nt, Artificial Sequence
  Sythetic
cuccgagcgcggcgcaugcgccgc

SEQ ID NO: 6372 - RNA, 18 nt, Artificial Sequence
  Sythetic
cgcgaggaaggagggcgc

SEQ ID NO: 6373 - RNA, 19 nt, Artificial Sequence
  Sythetic
acgcgaggaaggagggcgc

SEQ ID NO: 6374 - RNA, 20 nt, Artificial Sequence
  Sythetic
gacgcgaggaaggagggcgc

SEQ ID NO: 6375 - RNA, 21 nt, Artificial Sequence
  Sythetic
agacgcgaggaaggagggcgc

SEQ ID NO: 6376 - RNA, 22 nt, Artificial Sequence
  Sythetic
cagacgcgaggaaggagggcgc

SEQ ID NO: 6377 - RNA, 23 nt, Artificial Sequence
  Sythetic
gcagacgcgaggaaggagggcgc

SEQ ID NO: 6378 - RNA, 24 nt, Artificial Sequence
  Sythetic
ggcagacgcgaggaaggagggcgc

SEQ ID NO: 6379 - RNA, 18 nt, Artificial Sequence
  Sythetic
gagggaagcgggaugcgc

SEQ ID NO: 6380 - RNA, 19 nt, Artificial Sequence
  Sythetic
ugagggaagcgggaugcgc

SEQ ID NO: 6381 - RNA, 20 nt, Artificial Sequence
  Sythetic
uugagggaagcgggaugcgc

SEQ ID NO: 6382 - RNA, 21 nt, Artificial Sequence
  Sythetic
uuugagggaagcgggaugcgc

SEQ ID NO: 6383 - RNA, 22 nt, Artificial Sequence
  Sythetic
guuugagggaagcgggaugcgc

SEQ ID NO: 6384 - RNA, 23 nt, Artificial Sequence
  Sythetic
aguuugagggaagcgggaugcgc

SEQ ID NO: 6385 - RNA, 24 nt, Artificial Sequence
  Sythetic
aaguuugagggaagcgggaugcgc

SEQ ID NO: 6386 - RNA, 18 nt, Artificial Sequence
  Sythetic
ggcggagaggugcgcggc

SEQ ID NO: 6387 - RNA, 19 nt, Artificial Sequence
  Sythetic
gggcggagaggugcgcggc

SEQ ID NO: 6388 - RNA, 20 nt, Artificial Sequence
  Sythetic
ggggcggagaggugcgcggc

SEQ ID NO: 6389 - RNA, 21 nt, Artificial Sequence
  Sythetic
cggggcggagaggugcgcggc

SEQ ID NO: 6390 - RNA, 22 nt, Artificial Sequence
  Sythetic
gcggggcggagaggugcgcggc

SEQ ID NO: 6391 - RNA, 23 nt, Artificial Sequence
  Sythetic
ggcggggcggagaggugcgcggc

SEQ ID NO: 6392 - RNA, 24 nt, Artificial Sequence
  Sythetic
gggcggggcggagaggugcgcggc

SEQ ID NO: 6393 - RNA, 18 nt, Artificial Sequence
  Sythetic
caggugggaagcgcgggc

SEQ ID NO: 6394 - RNA, 19 nt, Artificial Sequence
  Sythetic
acaggugggaagcgcgggc

SEQ ID NO: 6395 - RNA, 20 nt, Artificial Sequence
  Sythetic
gacaggugggaagcgcgggc

SEQ ID NO: 6396 - RNA, 21 nt, Artificial Sequence
  Sythetic
agacaggugggaagcgcgggc

SEQ ID NO: 6397 - RNA, 22 nt, Artificial Sequence
  Sythetic
aagacaggugggaagcgcgggc

SEQ ID NO: 6398 - RNA, 23 nt, Artificial Sequence
  Sythetic
gaagacaggugggaagcgcgggc

SEQ ID NO: 6399 - RNA, 24 nt, Artificial Sequence
  Sythetic
ugaagacaggugggaagcgcgggc

SEQ ID NO: 6400 - RNA, 18 nt, Artificial Sequence
  Sythetic
cgcaugcgccgcuggggc

SEQ ID NO: 6401 - RNA, 19 nt, Artificial Sequence
  Sythetic
gcgcaugcgccgcuggggc

SEQ ID NO: 6402 - RNA, 20 nt, Artificial Sequence
  Sythetic
ggcgcaugcgccgcuggggc

SEQ ID NO: 6403 - RNA, 21 nt, Artificial Sequence
  Sythetic
cggcgcaugcgccgcuggggc

SEQ ID NO: 6404 - RNA, 22 nt, Artificial Sequence
  Sythetic
gcggcgcaugcgccgcuggggc

SEQ ID NO: 6405 - RNA, 23 nt, Artificial Sequence
  Sythetic
cgcggcgcaugcgccgcuggggc

SEQ ID NO: 6406 - RNA, 24 nt, Artificial Sequence
  Sythetic
gcgcggcgcaugcgccgcuggggc

SEQ ID NO: 6407 - RNA, 18 nt, Artificial Sequence
  Sythetic
accaguaggcggcaaugc

SEQ ID NO: 6408 - RNA, 19 nt, Artificial Sequence
  Sythetic
aaccaguaggcggcaaugc

SEQ ID NO: 6409 - RNA, 20 nt, Artificial Sequence
  Sythetic
caaccaguaggcggcaaugc

SEQ ID NO: 6410 - RNA, 21 nt, Artificial Sequence
  Sythetic
ccaaccaguaggcggcaaugc

SEQ ID NO: 6411 - RNA, 22 nt, Artificial Sequence
  Sythetic
cccaaccaguaggcggcaaugc

SEQ ID NO: 6412 - RNA, 23 nt, Artificial Sequence
  Sythetic
acccaaccaguaggcggcaaugc

SEQ ID NO: 6413 - RNA, 24 nt, Artificial Sequence
  Sythetic
aacccaaccaguaggcggcaaugc

SEQ ID NO: 6414 - RNA, 18 nt, Artificial Sequence
  Sythetic
ccgcgcgcggcgggacuc

SEQ ID NO: 6415 - RNA, 19 nt, Artificial Sequence
  Sythetic
gccgcgcgcggcgggacuc

SEQ ID NO: 6416 - RNA, 20 nt, Artificial Sequence
  Sythetic
cgccgcgcgcggcgggacuc

SEQ ID NO: 6417 - RNA, 21 nt, Artificial Sequence
  Sythetic
ccgccgcgcgcggcgggacuc

SEQ ID NO: 6418 - RNA, 22 nt, Artificial Sequence
  Sythetic
gccgccgcgcgcggcgggacuc

SEQ ID NO: 6419 - RNA, 23 nt, Artificial Sequence
  Sythetic
agccgccgcgcgcggcgggacuc

SEQ ID NO: 6420 - RNA, 24 nt, Artificial Sequence
  Sythetic
aagccgccgcgcgcggcgggacuc

SEQ ID NO: 6421 - RNA, 18 nt, Artificial Sequence
  Sythetic
agaccgguggucugaguc

SEQ ID NO: 6422 - RNA, 19 nt, Artificial Sequence
  Sythetic
gagaccgguggucugaguc

SEQ ID NO: 6423 - RNA, 20 nt, Artificial Sequence
  Sythetic
agagaccgguggucugaguc

SEQ ID NO: 6424 - RNA, 21 nt, Artificial Sequence
  Sythetic
aagagaccgguggucugaguc

SEQ ID NO: 6425 - RNA, 22 nt, Artificial Sequence
  Sythetic
gaagagaccgguggucugaguc

SEQ ID NO: 6426 - RNA, 23 nt, Artificial Sequence
  Sythetic
ggaagagaccgguggucugaguc

SEQ ID NO: 6427 - RNA, 24 nt, Artificial Sequence
  Sythetic
aggaagagaccgguggucugaguc

SEQ ID NO: 6428 - RNA, 18 nt, Artificial Sequence
  Sythetic
gguggucgguagugaguc

SEQ ID NO: 6429 - RNA, 19 nt, Artificial Sequence
  Sythetic
ggguggucgguagugaguc

SEQ ID NO: 6430 - RNA, 20 nt, Artificial Sequence
  Sythetic
cggguggucgguagugaguc

SEQ ID NO: 6431 - RNA, 21 nt, Artificial Sequence
  Sythetic
gcggguggucgguagugaguc

SEQ ID NO: 6432 - RNA, 22 nt, Artificial Sequence
  Sythetic
ugcggguggucgguagugaguc

SEQ ID NO: 6433 - RNA, 23 nt, Artificial Sequence
  Sythetic
uugcggguggucgguagugaguc

SEQ ID NO: 6434 - RNA, 24 nt, Artificial Sequence
  Sythetic
uuugcggguggucgguagugaguc

SEQ ID NO: 6435 - RNA, 18 nt, Artificial Sequence
  Sythetic
cacuauauaggcaugguc

SEQ ID NO: 6436 - RNA, 19 nt, Artificial Sequence
  Sythetic
gcacuauauaggcaugguc

SEQ ID NO: 6437 - RNA, 20 nt, Artificial Sequence
  Sythetic
cgcacuauauaggcaugguc

SEQ ID NO: 6438 - RNA, 21 nt, Artificial Sequence
  Sythetic
ccgcacuauauaggcaugguc

SEQ ID NO: 6439 - RNA, 22 nt, Artificial Sequence
  Sythetic
cccgcacuauauaggcaugguc

SEQ ID NO: 6440 - RNA, 23 nt, Artificial Sequence
  Sythetic
acccgcacuauauaggcaugguc

SEQ ID NO: 6441 - RNA, 24 nt, Artificial Sequence
  Sythetic
cacccgcacuauauaggcaugguc

SEQ ID NO: 6442 - RNA, 18 nt, Artificial Sequence
  Sythetic
agcagacgcagcccauuc

SEQ ID NO: 6443 - RNA, 19 nt, Artificial Sequence
  Sythetic
cagcagacgcagcccauuc

SEQ ID NO: 6444 - RNA, 20 nt, Artificial Sequence
  Sythetic
ucagcagacgcagcccauuc

SEQ ID NO: 6445 - RNA, 21 nt, Artificial Sequence
  Sythetic
uucagcagacgcagcccauuc

SEQ ID NO: 6446 - RNA, 22 nt, Artificial Sequence
  Sythetic
uuucagcagacgcagcccauuc

SEQ ID NO: 6447 - RNA, 23 nt, Artificial Sequence
  Sythetic
cuuucagcagacgcagcccauuc

SEQ ID NO: 6448 - RNA, 24 nt, Artificial Sequence
  Sythetic
gcuuucagcagacgcagcccauuc

SEQ ID NO: 6449 - RNA, 18 nt, Artificial Sequence
  Sythetic
cgcgcggcgggacucaag

SEQ ID NO: 6450 - RNA, 19 nt, Artificial Sequence
  Sythetic
gcgcgcggcgggacucaag

SEQ ID NO: 6451 - RNA, 20 nt, Artificial Sequence
  Sythetic
cgcgcgcggcgggacucaag

SEQ ID NO: 6452 - RNA, 21 nt, Artificial Sequence
  Sythetic
ccgcgcgcggcgggacucaag

SEQ ID NO: 6453 - RNA, 22 nt, Artificial Sequence
  Sythetic
gccgcgcgcggcgggacucaag

SEQ ID NO: 6454 - RNA, 23 nt, Artificial Sequence
  Sythetic
cgccgcgcgcggcgggacucaag

SEQ ID NO: 6455 - RNA, 24 nt, Artificial Sequence
  Sythetic
ccgccgcgcgcggcgggacucaag

SEQ ID NO: 6456 - RNA, 18 nt, Artificial Sequence
  Sythetic
ggggcggggagggagaag

SEQ ID NO: 6457 - RNA, 19 nt, Artificial Sequence
  Sythetic
uggggcggggagggagaag

SEQ ID NO: 6458 - RNA, 20 nt, Artificial Sequence
  Sythetic
cuggggcggggagggagaag

SEQ ID NO: 6459 - RNA, 21 nt, Artificial Sequence
  Sythetic
gcuggggcggggagggagaag

SEQ ID NO: 6460 - RNA, 22 nt, Artificial Sequence
  Sythetic
cgcuggggcggggagggagaag

SEQ ID NO: 6461 - RNA, 23 nt, Artificial Sequence
  Sythetic
ccgcuggggcggggagggagaag

SEQ ID NO: 6462 - RNA, 24 nt, Artificial Sequence
  Sythetic
gccgcuggggcggggagggagaag

SEQ ID NO: 6463 - RNA, 18 nt, Artificial Sequence
  Sythetic
ggggcagacgcgaggaag

SEQ ID NO: 6464 - RNA, 19 nt, Artificial Sequence
  Sythetic
aggggcagacgcgaggaag

SEQ ID NO: 6465 - RNA, 20 nt, Artificial Sequence
  Sythetic
gaggggcagacgcgaggaag

SEQ ID NO: 6466 - RNA, 21 nt, Artificial Sequence
  Sythetic
agaggggcagacgcgaggaag

SEQ ID NO: 6467 - RNA, 22 nt, Artificial Sequence
  Sythetic
gagaggggcagacgcgaggaag

SEQ ID NO: 6468 - RNA, 23 nt, Artificial Sequence
  Sythetic
ggagaggggcagacgcgaggaag

SEQ ID NO: 6469 - RNA, 24 nt, Artificial Sequence
  Sythetic
gggagaggggcagacgcgaggaag

SEQ ID NO: 6470 - RNA, 18 nt, Artificial Sequence
  Sythetic
aggcggcaaugcuggaag

SEQ ID NO: 6471 - RNA, 19 nt, Artificial Sequence
  Sythetic
uaggcggcaaugcuggaag

SEQ ID NO: 6472 - RNA, 20 nt, Artificial Sequence
  Sythetic
guaggcggcaaugcuggaag

SEQ ID NO: 6473 - RNA, 21 nt, Artificial Sequence
  Sythetic
aguaggcggcaaugcuggaag

SEQ ID NO: 6474 - RNA, 22 nt, Artificial Sequence
  Sythetic
caguaggcggcaaugcuggaag

SEQ ID NO: 6475 - RNA, 23 nt, Artificial Sequence
  Sythetic
ccaguaggcggcaaugcuggaag

SEQ ID NO: 6476 - RNA, 24 nt, Artificial Sequence
  Sythetic
accaguaggcggcaaugcuggaag

SEQ ID NO: 6477 - RNA, 18 nt, Artificial Sequence
  Sythetic
ggaugcgccugaagacag

SEQ ID NO: 6478 - RNA, 19 nt, Artificial Sequence
  Sythetic
gggaugcgccugaagacag

SEQ ID NO: 6479 - RNA, 20 nt, Artificial Sequence
  Sythetic
cgggaugcgccugaagacag

SEQ ID NO: 6480 - RNA, 21 nt, Artificial Sequence
  Sythetic
gcgggaugcgccugaagacag

SEQ ID NO: 6481 - RNA, 22 nt, Artificial Sequence
  Sythetic
agcgggaugcgccugaagacag

SEQ ID NO: 6482 - RNA, 23 nt, Artificial Sequence
  Sythetic
aagcgggaugcgccugaagacag

SEQ ID NO: 6483 - RNA, 24 nt, Artificial Sequence
  Sythetic
gaagcgggaugcgccugaagacag

SEQ ID NO: 6484 - RNA, 18 nt, Artificial Sequence
  Sythetic
gaccugggaaugcuacag

SEQ ID NO: 6485 - RNA, 19 nt, Artificial Sequence
  Sythetic
agaccugggaaugcuacag

SEQ ID NO: 6486 - RNA, 20 nt, Artificial Sequence
  Sythetic
cagaccugggaaugcuacag

SEQ ID NO: 6487 - RNA, 21 nt, Artificial Sequence
  Sythetic
ccagaccugggaaugcuacag

SEQ ID NO: 6488 - RNA, 22 nt, Artificial Sequence
  Sythetic
uccagaccugggaaugcuacag

SEQ ID NO: 6489 - RNA, 23 nt, Artificial Sequence
  Sythetic
uuccagaccugggaaugcuacag

SEQ ID NO: 6490 - RNA, 24 nt, Artificial Sequence
  Sythetic
auuccagaccugggaaugcuacag

SEQ ID NO: 6491 - RNA, 18 nt, Artificial Sequence
  Sythetic
ucgguagugaguccggag

SEQ ID NO: 6492 - RNA, 19 nt, Artificial Sequence
  Sythetic
gucgguagugaguccggag

SEQ ID NO: 6493 - RNA, 20 nt, Artificial Sequence
  Sythetic
ggucgguagugaguccggag

SEQ ID NO: 6494 - RNA, 21 nt, Artificial Sequence
  Sythetic
uggucgguagugaguccggag

SEQ ID NO: 6495 - RNA, 22 nt, Artificial Sequence
  Sythetic
guggucgguagugaguccggag

SEQ ID NO: 6496 - RNA, 23 nt, Artificial Sequence
  Sythetic
gguggucgguagugaguccggag

SEQ ID NO: 6497 - RNA, 24 nt, Artificial Sequence
  Sythetic
ggguggucgguagugaguccggag

SEQ ID NO: 6498 - RNA, 18 nt, Artificial Sequence
  Sythetic
gcuucugcccgcucggag

SEQ ID NO: 6499 - RNA, 19 nt, Artificial Sequence
  Sythetic
cgcuucugcccgcucggag

SEQ ID NO: 6500 - RNA, 20 nt, Artificial Sequence
  Sythetic
ccgcuucugcccgcucggag

SEQ ID NO: 6501 - RNA, 21 nt, Artificial Sequence
  Sythetic
gccgcuucugcccgcucggag

SEQ ID NO: 6502 - RNA, 22 nt, Artificial Sequence
  Sythetic
ggccgcuucugcccgcucggag

SEQ ID NO: 6503 - RNA, 23 nt, Artificial Sequence
  Sythetic
uggccgcuucugcccgcucggag

SEQ ID NO: 6504 - RNA, 24 nt, Artificial Sequence
  Sythetic
cuggccgcuucugcccgcucggag

SEQ ID NO: 6505 - RNA, 18 nt, Artificial Sequence
  Sythetic
gaaggcggggugggggag

SEQ ID NO: 6506 - RNA, 19 nt, Artificial Sequence
  Sythetic
agaaggcggggugggggag

SEQ ID NO: 6507 - RNA, 20 nt, Artificial Sequence
  Sythetic
gagaaggcggggugggggag

SEQ ID NO: 6508 - RNA, 21 nt, Artificial Sequence
  Sythetic
ggagaaggcggggugggggag

SEQ ID NO: 6509 - RNA, 22 nt, Artificial Sequence
  Sythetic
gggagaaggcggggugggggag

SEQ ID NO: 6510 - RNA, 23 nt, Artificial Sequence
  Sythetic
agggagaaggcggggugggggag

SEQ ID NO: 6511 - RNA, 24 nt, Artificial Sequence
  Sythetic
gagggagaaggcggggugggggag

SEQ ID NO: 6512 - RNA, 18 nt, Artificial Sequence
  Sythetic
agcgcggcgcaugcgccg

SEQ ID NO: 6513 - RNA, 19 nt, Artificial Sequence
  Sythetic
gagcgcggcgcaugcgccg

SEQ ID NO: 6514 - RNA, 20 nt, Artificial Sequence
  Sythetic
cgagcgcggcgcaugcgccg

SEQ ID NO: 6515 - RNA, 21 nt, Artificial Sequence
  Sythetic
ccgagcgcggcgcaugcgccg

SEQ ID NO: 6516 - RNA, 22 nt, Artificial Sequence
  Sythetic
uccgagcgcggcgcaugcgccg

SEQ ID NO: 6517 - RNA, 23 nt, Artificial Sequence
  Sythetic
cuccgagcgcggcgcaugcgccg

SEQ ID NO: 6518 - RNA, 24 nt, Artificial Sequence
  Sythetic
gcuccgagcgcggcgcaugcgccg

SEQ ID NO: 6519 - RNA, 18 nt, Artificial Sequence
  Sythetic
gggagaggggcagacgcg

SEQ ID NO: 6520 - RNA, 19 nt, Artificial Sequence
  Sythetic
ggggagaggggcagacgcg

SEQ ID NO: 6521 - RNA, 20 nt, Artificial Sequence
  Sythetic
gggggagaggggcagacgcg

SEQ ID NO: 6522 - RNA, 21 nt, Artificial Sequence
  Sythetic
ugggggagaggggcagacgcg

SEQ ID NO: 6523 - RNA, 22 nt, Artificial Sequence
  Sythetic
gugggggagaggggcagacgcg

SEQ ID NO: 6524 - RNA, 23 nt, Artificial Sequence
  Sythetic
ggugggggagaggggcagacgcg

SEQ ID NO: 6525 - RNA, 24 nt, Artificial Sequence
  Sythetic
gggugggggagaggggcagacgcg

SEQ ID NO: 6526 - RNA, 18 nt, Artificial Sequence
  Sythetic
ugcaagccgccgcgcgcg

SEQ ID NO: 6527 - RNA, 19 nt, Artificial Sequence
  Sythetic
gugcaagccgccgcgcgcg

SEQ ID NO: 6528 - RNA, 20 nt, Artificial Sequence
  Sythetic
cgugcaagccgccgcgcgcg

SEQ ID NO: 6529 - RNA, 21 nt, Artificial Sequence
  Sythetic
gcgugcaagccgccgcgcgcg

SEQ ID NO: 6530 - RNA, 22 nt, Artificial Sequence
  Sythetic
agcgugcaagccgccgcgcgcg

SEQ ID NO: 6531 - RNA, 23 nt, Artificial Sequence
  Sythetic
cagcgugcaagccgccgcgcgcg

SEQ ID NO: 6532 - RNA, 24 nt, Artificial Sequence
  Sythetic
acagcgugcaagccgccgcgcgcg

SEQ ID NO: 6533 - RNA, 18 nt, Artificial Sequence
  Sythetic
acgcgaggaaggagggcg

SEQ ID NO: 6534 - RNA, 19 nt, Artificial Sequence
  Sythetic
gacgcgaggaaggagggcg

SEQ ID NO: 6535 - RNA, 20 nt, Artificial Sequence
  Sythetic
agacgcgaggaaggagggcg

SEQ ID NO: 6536 - RNA, 21 nt, Artificial Sequence
  Sythetic
cagacgcgaggaaggagggcg

SEQ ID NO: 6537 - RNA, 22 nt, Artificial Sequence
  Sythetic
gcagacgcgaggaaggagggcg

SEQ ID NO: 6538 - RNA, 23 nt, Artificial Sequence
  Sythetic
ggcagacgcgaggaaggagggcg

SEQ ID NO: 6539 - RNA, 24 nt, Artificial Sequence
  Sythetic
gggcagacgcgaggaaggagggcg

SEQ ID NO: 6540 - RNA, 18 nt, Artificial Sequence
  Sythetic
gggcgcaggggcggggcg

SEQ ID NO: 6541 - RNA, 19 nt, Artificial Sequence
  Sythetic
agggcgcaggggcggggcg

SEQ ID NO: 6542 - RNA, 20 nt, Artificial Sequence
  Sythetic
gagggcgcaggggcggggcg

SEQ ID NO: 6543 - RNA, 21 nt, Artificial Sequence
  Sythetic
ggagggcgcaggggcggggcg

SEQ ID NO: 6544 - RNA, 22 nt, Artificial Sequence
  Sythetic
aggagggcgcaggggcggggcg

SEQ ID NO: 6545 - RNA, 23 nt, Artificial Sequence
  Sythetic
aaggagggcgcaggggcggggcg

SEQ ID NO: 6546 - RNA, 24 nt, Artificial Sequence
  Sythetic
gaaggagggcgcaggggcggggcg

SEQ ID NO: 6547 - RNA, 18 nt, Artificial Sequence
  Sythetic
gcaugcgccgcuggggcg

SEQ ID NO: 6548 - RNA, 19 nt, Artificial Sequence
  Sythetic
cgcaugcgccgcuggggcg

SEQ ID NO: 6549 - RNA, 20 nt, Artificial Sequence
  Sythetic
gcgcaugcgccgcuggggcg

SEQ ID NO: 6550 - RNA, 21 nt, Artificial Sequence
  Sythetic
ggcgcaugcgccgcuggggcg

SEQ ID NO: 6551 - RNA, 22 nt, Artificial Sequence
  Sythetic
cggcgcaugcgccgcuggggcg

SEQ ID NO: 6552 - RNA, 23 nt, Artificial Sequence
  Sythetic
gcggcgcaugcgccgcuggggcg

SEQ ID NO: 6553 - RNA, 24 nt, Artificial Sequence
  Sythetic
cgcggcgcaugcgccgcuggggcg

SEQ ID NO: 6554 - RNA, 18 nt, Artificial Sequence
  Sythetic
gccgcuucugcccgcucg

SEQ ID NO: 6555 - RNA, 19 nt, Artificial Sequence
  Sythetic
ggccgcuucugcccgcucg

SEQ ID NO: 6556 - RNA, 20 nt, Artificial Sequence
  Sythetic
uggccgcuucugcccgcucg

SEQ ID NO: 6557 - RNA, 21 nt, Artificial Sequence
  Sythetic
cuggccgcuucugcccgcucg

SEQ ID NO: 6558 - RNA, 22 nt, Artificial Sequence
  Sythetic
ccuggccgcuucugcccgcucg

SEQ ID NO: 6559 - RNA, 23 nt, Artificial Sequence
  Sythetic
uccuggccgcuucugcccgcucg

SEQ ID NO: 6560 - RNA, 24 nt, Artificial Sequence
  Sythetic
guccuggccgcuucugcccgcucg

SEQ ID NO: 6561 - RNA, 18 nt, Artificial Sequence
  Sythetic
gcgcggcgggacucaagg

SEQ ID NO: 6562 - RNA, 19 nt, Artificial Sequence
  Sythetic
cgcgcggcgggacucaagg

SEQ ID NO: 6563 - RNA, 20 nt, Artificial Sequence
  Sythetic
gcgcgcggcgggacucaagg

SEQ ID NO: 6564 - RNA, 21 nt, Artificial Sequence
  Sythetic
cgcgcgcggcgggacucaagg

SEQ ID NO: 6565 - RNA, 22 nt, Artificial Sequence
  Sythetic
ccgcgcgcggcgggacucaagg

SEQ ID NO: 6566 - RNA, 23 nt, Artificial Sequence
  Sythetic
gccgcgcgcggcgggacucaagg

SEQ ID NO: 6567 - RNA, 24 nt, Artificial Sequence
  Sythetic
cgccgcgcgcggcgggacucaagg

SEQ ID NO: 6568 - RNA, 18 nt, Artificial Sequence
  Sythetic
gaugcgccugaagacagg

SEQ ID NO: 6569 - RNA, 19 nt, Artificial Sequence
  Sythetic
ggaugcgccugaagacagg

SEQ ID NO: 6570 - RNA, 20 nt, Artificial Sequence
  Sythetic
gggaugcgccugaagacagg

SEQ ID NO: 6571 - RNA, 21 nt, Artificial Sequence
  Sythetic
cgggaugcgccugaagacagg

SEQ ID NO: 6572 - RNA, 22 nt, Artificial Sequence
  Sythetic
gcgggaugcgccugaagacagg

SEQ ID NO: 6573 - RNA, 23 nt, Artificial Sequence
  Sythetic
agcgggaugcgccugaagacagg

SEQ ID NO: 6574 - RNA, 24 nt, Artificial Sequence
  Sythetic
aagcgggaugcgccugaagacagg

SEQ ID NO: 6575 - RNA, 18 nt, Artificial Sequence
  Sythetic
cauuuaugacaaagcagg

SEQ ID NO: 6576 - RNA, 19 nt, Artificial Sequence
  Sythetic
acauuuaugacaaagcagg

SEQ ID NO: 6577 - RNA, 20 nt, Artificial Sequence
  Sythetic
uacauuuaugacaaagcagg

SEQ ID NO: 6578 - RNA, 21 nt, Artificial Sequence
  Sythetic
guacauuuaugacaaagcagg

SEQ ID NO: 6579 - RNA, 22 nt, Artificial Sequence
  Sythetic
uguacauuuaugacaaagcagg

SEQ ID NO: 6580 - RNA, 23 nt, Artificial Sequence
  Sythetic
uuguacauuuaugacaaagcagg

SEQ ID NO: 6581 - RNA, 24 nt, Artificial Sequence
  Sythetic
uuuguacauuuaugacaaagcagg

SEQ ID NO: 6582 - RNA, 18 nt, Artificial Sequence
  Sythetic
agaggggcagacgcgagg

SEQ ID NO: 6583 - RNA, 19 nt, Artificial Sequence
  Sythetic
gagaggggcagacgcgagg

SEQ ID NO: 6584 - RNA, 20 nt, Artificial Sequence
  Sythetic
ggagaggggcagacgcgagg

SEQ ID NO: 6585 - RNA, 21 nt, Artificial Sequence
  Sythetic
gggagaggggcagacgcgagg

SEQ ID NO: 6586 - RNA, 22 nt, Artificial Sequence
  Sythetic
ggggagaggggcagacgcgagg

SEQ ID NO: 6587 - RNA, 23 nt, Artificial Sequence
  Sythetic
gggggagaggggcagacgcgagg

SEQ ID NO: 6588 - RNA, 24 nt, Artificial Sequence
  Sythetic
ugggggagaggggcagacgcgagg

SEQ ID NO: 6589 - RNA, 18 nt, Artificial Sequence
  Sythetic
gccgcuggggcggggagg

SEQ ID NO: 6590 - RNA, 19 nt, Artificial Sequence
  Sythetic
cgccgcuggggcggggagg

SEQ ID NO: 6591 - RNA, 20 nt, Artificial Sequence
  Sythetic
gcgccgcuggggcggggagg

SEQ ID NO: 6592 - RNA, 21 nt, Artificial Sequence
  Sythetic
ugcgccgcuggggcggggagg

SEQ ID NO: 6593 - RNA, 22 nt, Artificial Sequence
  Sythetic
augcgccgcuggggcggggagg

SEQ ID NO: 6594 - RNA, 23 nt, Artificial Sequence
  Sythetic
caugcgccgcuggggcggggagg

SEQ ID NO: 6595 - RNA, 24 nt, Artificial Sequence
  Sythetic
gcaugcgccgcuggggcggggagg

SEQ ID NO: 6596 - RNA, 18 nt, Artificial Sequence
  Sythetic
ugaaguuucuggccgcgg

SEQ ID NO: 6597 - RNA, 19 nt, Artificial Sequence
  Sythetic
cugaaguuucuggccgcgg

SEQ ID NO: 6598 - RNA, 20 nt, Artificial Sequence
  Sythetic
acugaaguuucuggccgcgg

SEQ ID NO: 6599 - RNA, 21 nt, Artificial Sequence
  Sythetic
aacugaaguuucuggccgcgg

SEQ ID NO: 6600 - RNA, 22 nt, Artificial Sequence
  Sythetic
aaacugaaguuucuggccgcgg

SEQ ID NO: 6601 - RNA, 23 nt, Artificial Sequence
  Sythetic
caaacugaaguuucuggccgcgg

SEQ ID NO: 6602 - RNA, 24 nt, Artificial Sequence
  Sythetic
acaaacugaaguuucuggccgcgg

SEQ ID NO: 6603 - RNA, 18 nt, Artificial Sequence
  Sythetic
gcaagccgccgcgcgcgg

SEQ ID NO: 6604 - RNA, 19 nt, Artificial Sequence
  Sythetic
ugcaagccgccgcgcgcgg

SEQ ID NO: 6605 - RNA, 20 nt, Artificial Sequence
  Sythetic
gugcaagccgccgcgcgcgg

SEQ ID NO: 6606 - RNA, 21 nt, Artificial Sequence
  Sythetic
cgugcaagccgccgcgcgcgg

SEQ ID NO: 6607 - RNA, 22 nt, Artificial Sequence
  Sythetic
gcgugcaagccgccgcgcgcgg

SEQ ID NO: 6608 - RNA, 23 nt, Artificial Sequence
  Sythetic
agcgugcaagccgccgcgcgcgg

SEQ ID NO: 6609 - RNA, 24 nt, Artificial Sequence
  Sythetic
cagcgugcaagccgccgcgcgcgg

SEQ ID NO: 6610 - RNA, 18 nt, Artificial Sequence
  Sythetic
agacacugaggcccaggg

SEQ ID NO: 6611 - RNA, 19 nt, Artificial Sequence
  Sythetic
gagacacugaggcccaggg

SEQ ID NO: 6612 - RNA, 20 nt, Artificial Sequence
  Sythetic
agagacacugaggcccaggg

SEQ ID NO: 6613 - RNA, 21 nt, Artificial Sequence
  Sythetic
uagagacacugaggcccaggg

SEQ ID NO: 6614 - RNA, 22 nt, Artificial Sequence
  Sythetic
guagagacacugaggcccaggg

SEQ ID NO: 6615 - RNA, 23 nt, Artificial Sequence
  Sythetic
aguagagacacugaggcccaggg

SEQ ID NO: 6616 - RNA, 24 nt, Artificial Sequence
  Sythetic
caguagagacacugaggcccaggg

SEQ ID NO: 6617 - RNA, 18 nt, Artificial Sequence
  Sythetic
aggaaggagggcgcaggg

SEQ ID NO: 6618 - RNA, 19 nt, Artificial Sequence
  Sythetic
gaggaaggagggcgcaggg

SEQ ID NO: 6619 - RNA, 20 nt, Artificial Sequence
  Sythetic
cgaggaaggagggcgcaggg

SEQ ID NO: 6620 - RNA, 21 nt, Artificial Sequence
  Sythetic
gcgaggaaggagggcgcaggg

SEQ ID NO: 6621 - RNA, 22 nt, Artificial Sequence
  Sythetic
cgcgaggaaggagggcgcaggg

SEQ ID NO: 6622 - RNA, 23 nt, Artificial Sequence
  Sythetic
acgcgaggaaggagggcgcaggg

SEQ ID NO: 6623 - RNA, 24 nt, Artificial Sequence
  Sythetic
gacgcgaggaaggagggcgcaggg

SEQ ID NO: 6624 - RNA, 18 nt, Artificial Sequence
  Sythetic
ggggagggagaaggcggg

SEQ ID NO: 6625 - RNA, 19 nt, Artificial Sequence
  Sythetic
cggggagggagaaggcggg

SEQ ID NO: 6626 - RNA, 20 nt, Artificial Sequence
  Sythetic
gcggggagggagaaggcggg

SEQ ID NO: 6627 - RNA, 21 nt, Artificial Sequence
  Sythetic
ggcggggagggagaaggcggg

SEQ ID NO: 6628 - RNA, 22 nt, Artificial Sequence
  Sythetic
gggcggggagggagaaggcggg

SEQ ID NO: 6629 - RNA, 23 nt, Artificial Sequence
  Sythetic
ggggcggggagggagaaggcggg

SEQ ID NO: 6630 - RNA, 24 nt, Artificial Sequence
  Sythetic
uggggcggggagggagaaggcggg

SEQ ID NO: 6631 - RNA, 18 nt, Artificial Sequence
  Sythetic
ggagggcgcaggggcggg

SEQ ID NO: 6632 - RNA, 19 nt, Artificial Sequence
  Sythetic
aggagggcgcaggggcggg

SEQ ID NO: 6633 - RNA, 20 nt, Artificial Sequence
  Sythetic
aaggagggcgcaggggcggg

SEQ ID NO: 6634 - RNA, 21 nt, Artificial Sequence
  Sythetic
gaaggagggcgcaggggcggg

SEQ ID NO: 6635 - RNA, 22 nt, Artificial Sequence
  Sythetic
ggaaggagggcgcaggggcggg

SEQ ID NO: 6636 - RNA, 23 nt, Artificial Sequence
  Sythetic
aggaaggagggcgcaggggcggg

SEQ ID NO: 6637 - RNA, 24 nt, Artificial Sequence
  Sythetic
gaggaaggagggcgcaggggcggg

SEQ ID NO: 6638 - RNA, 18 nt, Artificial Sequence
  Sythetic
augcgccgcuggggcggg

SEQ ID NO: 6639 - RNA, 19 nt, Artificial Sequence
  Sythetic
caugcgccgcuggggcggg

SEQ ID NO: 6640 - RNA, 20 nt, Artificial Sequence
  Sythetic
gcaugcgccgcuggggcggg

SEQ ID NO: 6641 - RNA, 21 nt, Artificial Sequence
  Sythetic
cgcaugcgccgcuggggcggg

SEQ ID NO: 6642 - RNA, 22 nt, Artificial Sequence
  Sythetic
gcgcaugcgccgcuggggcggg

SEQ ID NO: 6643 - RNA, 23 nt, Artificial Sequence
  Sythetic
ggcgcaugcgccgcuggggcggg

SEQ ID NO: 6644 - RNA, 24 nt, Artificial Sequence
  Sythetic
cggcgcaugcgccgcuggggcggg

SEQ ID NO: 6645 - RNA, 18 nt, Artificial Sequence
  Sythetic
ggaaggagggcgcagggg

SEQ ID NO: 6646 - RNA, 19 nt, Artificial Sequence
  Sythetic
aggaaggagggcgcagggg

SEQ ID NO: 6647 - RNA, 20 nt, Artificial Sequence
  Sythetic
gaggaaggagggcgcagggg

SEQ ID NO: 6648 - RNA, 21 nt, Artificial Sequence
  Sythetic
cgaggaaggagggcgcagggg

SEQ ID NO: 6649 - RNA, 22 nt, Artificial Sequence
  Sythetic
gcgaggaaggagggcgcagggg

SEQ ID NO: 6650 - RNA, 23 nt, Artificial Sequence
  Sythetic
cgcgaggaaggagggcgcagggg

SEQ ID NO: 6651 - RNA, 24 nt, Artificial Sequence
  Sythetic
acgcgaggaaggagggcgcagggg

SEQ ID NO: 6652 - RNA, 18 nt, Artificial Sequence
  Sythetic
gggagggagaaggcgggg

SEQ ID NO: 6653 - RNA, 19 nt, Artificial Sequence
  Sythetic
ggggagggagaaggcgggg

SEQ ID NO: 6654 - RNA, 20 nt, Artificial Sequence
  Sythetic
cggggagggagaaggcgggg

SEQ ID NO: 6655 - RNA, 21 nt, Artificial Sequence
  Sythetic
gcggggagggagaaggcgggg

SEQ ID NO: 6656 - RNA, 22 nt, Artificial Sequence
  Sythetic
ggcggggagggagaaggcgggg

SEQ ID NO: 6657 - RNA, 23 nt, Artificial Sequence
  Sythetic
gggcggggagggagaaggcgggg

SEQ ID NO: 6658 - RNA, 24 nt, Artificial Sequence
  Sythetic
ggggcggggagggagaaggcgggg

SEQ ID NO: 6659 - RNA, 18 nt, Artificial Sequence
  Sythetic
gagggcgcaggggcgggg

SEQ ID NO: 6660 - RNA, 19 nt, Artificial Sequence
  Sythetic
ggagggcgcaggggcgggg

SEQ ID NO: 6661 - RNA, 20 nt, Artificial Sequence
  Sythetic
aggagggcgcaggggcgggg

SEQ ID NO: 6662 - RNA, 21 nt, Artificial Sequence
  Sythetic
aaggagggcgcaggggcgggg

SEQ ID NO: 6663 - RNA, 22 nt, Artificial Sequence
  Sythetic
gaaggagggcgcaggggcgggg

SEQ ID NO: 6664 - RNA, 23 nt, Artificial Sequence
  Sythetic
ggaaggagggcgcaggggcgggg

SEQ ID NO: 6665 - RNA, 24 nt, Artificial Sequence
  Sythetic
aggaaggagggcgcaggggcgggg

SEQ ID NO: 6666 - RNA, 18 nt, Artificial Sequence
  Sythetic
ugcgccgcuggggcgggg

SEQ ID NO: 6667 - RNA, 19 nt, Artificial Sequence
  Sythetic
augcgccgcuggggcgggg

SEQ ID NO: 6668 - RNA, 20 nt, Artificial Sequence
  Sythetic
caugcgccgcuggggcgggg

SEQ ID NO: 6669 - RNA, 21 nt, Artificial Sequence
  Sythetic
gcaugcgccgcuggggcgggg

SEQ ID NO: 6670 - RNA, 22 nt, Artificial Sequence
  Sythetic
cgcaugcgccgcuggggcgggg

SEQ ID NO: 6671 - RNA, 23 nt, Artificial Sequence
  Sythetic
gcgcaugcgccgcuggggcgggg

SEQ ID NO: 6672 - RNA, 24 nt, Artificial Sequence
  Sythetic
ggcgcaugcgccgcuggggcgggg

SEQ ID NO: 6673 - RNA, 18 nt, Artificial Sequence
  Sythetic
gcgcaugcgccgcugggg

SEQ ID NO: 6674 - RNA, 19 nt, Artificial Sequence
  Sythetic
ggcgcaugcgccgcugggg

SEQ ID NO: 6675 - RNA, 20 nt, Artificial Sequence
  Sythetic
cggcgcaugcgccgcugggg

SEQ ID NO: 6676 - RNA, 21 nt, Artificial Sequence
  Sythetic
gcggcgcaugcgccgcugggg

SEQ ID NO: 6677 - RNA, 22 nt, Artificial Sequence
  Sythetic
cgcggcgcaugcgccgcugggg

SEQ ID NO: 6678 - RNA, 23 nt, Artificial Sequence
  Sythetic
gcgcggcgcaugcgccgcugggg

SEQ ID NO: 6679 - RNA, 24 nt, Artificial Sequence
  Sythetic
agcgcggcgcaugcgccgcugggg

SEQ ID NO: 6680 - RNA, 18 nt, Artificial Sequence
  Sythetic
ggagaaggcggggugggg

SEQ ID NO: 6681 - RNA, 19 nt, Artificial Sequence
  Sythetic
gggagaaggcggggugggg

SEQ ID NO: 6682 - RNA, 20 nt, Artificial Sequence
  Sythetic
agggagaaggcggggugggg

SEQ ID NO: 6683 - RNA, 21 nt, Artificial Sequence
  Sythetic
gagggagaaggcggggugggg

SEQ ID NO: 6684 - RNA, 22 nt, Artificial Sequence
  Sythetic
ggagggagaaggcggggugggg

SEQ ID NO: 6685 - RNA, 23 nt, Artificial Sequence
  Sythetic
gggagggagaaggcggggugggg

SEQ ID NO: 6686 - RNA, 24 nt, Artificial Sequence
  Sythetic
ggggagggagaaggcggggugggg

SEQ ID NO: 6687 - RNA, 18 nt, Artificial Sequence
  Sythetic
ggcgcaugcgccgcuggg

SEQ ID NO: 6688 - RNA, 19 nt, Artificial Sequence
  Sythetic
cggcgcaugcgccgcuggg

SEQ ID NO: 6689 - RNA, 20 nt, Artificial Sequence
  Sythetic
gcggcgcaugcgccgcuggg

SEQ ID NO: 6690 - RNA, 21 nt, Artificial Sequence
  Sythetic
cgcggcgcaugcgccgcuggg

SEQ ID NO: 6691 - RNA, 22 nt, Artificial Sequence
  Sythetic
gcgcggcgcaugcgccgcuggg

SEQ ID NO: 6692 - RNA, 23 nt, Artificial Sequence
  Sythetic
agcgcggcgcaugcgccgcuggg

SEQ ID NO: 6693 - RNA, 24 nt, Artificial Sequence
  Sythetic
gagcgcggcgcaugcgccgcuggg

SEQ ID NO: 6694 - RNA, 18 nt, Artificial Sequence
  Sythetic
ccauccuugcuaaagugg

SEQ ID NO: 6695 - RNA, 19 nt, Artificial Sequence
  Sythetic
uccauccuugcuaaagugg

SEQ ID NO: 6696 - RNA, 20 nt, Artificial Sequence
  Sythetic
guccauccuugcuaaagugg

SEQ ID NO: 6697 - RNA, 21 nt, Artificial Sequence
  Sythetic
cguccauccuugcuaaagugg

SEQ ID NO: 6698 - RNA, 22 nt, Artificial Sequence
  Sythetic
gcguccauccuugcuaaagugg

SEQ ID NO: 6699 - RNA, 23 nt, Artificial Sequence
  Sythetic
cgcguccauccuugcuaaagugg

SEQ ID NO: 6700 - RNA, 24 nt, Artificial Sequence
  Sythetic
gcgcguccauccuugcuaaagugg

SEQ ID NO: 6701 - RNA, 18 nt, Artificial Sequence
  Sythetic
agggagaaggcggggugg

SEQ ID NO: 6702 - RNA, 19 nt, Artificial Sequence
  Sythetic
gagggagaaggcggggugg

SEQ ID NO: 6703 - RNA, 20 nt, Artificial Sequence
  Sythetic
ggagggagaaggcggggugg

SEQ ID NO: 6704 - RNA, 21 nt, Artificial Sequence
  Sythetic
gggagggagaaggcggggugg

SEQ ID NO: 6705 - RNA, 22 nt, Artificial Sequence
  Sythetic
ggggagggagaaggcggggugg

SEQ ID NO: 6706 - RNA, 23 nt, Artificial Sequence
  Sythetic
cggggagggagaaggcggggugg

SEQ ID NO: 6707 - RNA, 24 nt, Artificial Sequence
  Sythetic
gcggggagggagaaggcggggugg

SEQ ID NO: 6708 - RNA, 18 nt, Artificial Sequence
  Sythetic
aaccaguaggcggcaaug

SEQ ID NO: 6709 - RNA, 19 nt, Artificial Sequence
  Sythetic
caaccaguaggcggcaaug

SEQ ID NO: 6710 - RNA, 20 nt, Artificial Sequence
  Sythetic
ccaaccaguaggcggcaaug

SEQ ID NO: 6711 - RNA, 21 nt, Artificial Sequence
  Sythetic
cccaaccaguaggcggcaaug

SEQ ID NO: 6712 - RNA, 22 nt, Artificial Sequence
  Sythetic
acccaaccaguaggcggcaaug

SEQ ID NO: 6713 - RNA, 23 nt, Artificial Sequence
  Sythetic
aacccaaccaguaggcggcaaug

SEQ ID NO: 6714 - RNA, 24 nt, Artificial Sequence
  Sythetic
uaacccaaccaguaggcggcaaug

SEQ ID NO: 6715 - RNA, 18 nt, Artificial Sequence
  Sythetic
gagggagaaggcggggug

SEQ ID NO: 6716 - RNA, 19 nt, Artificial Sequence
  Sythetic
ggagggagaaggcggggug

SEQ ID NO: 6717 - RNA, 20 nt, Artificial Sequence
  Sythetic
gggagggagaaggcggggug

SEQ ID NO: 6718 - RNA, 21 nt, Artificial Sequence
  Sythetic
ggggagggagaaggcggggug

SEQ ID NO: 6719 - RNA, 22 nt, Artificial Sequence
  Sythetic
cggggagggagaaggcggggug

SEQ ID NO: 6720 - RNA, 23 nt, Artificial Sequence
  Sythetic
gcggggagggagaaggcggggug

SEQ ID NO: 6721 - RNA, 24 nt, Artificial Sequence
  Sythetic
ggcggggagggagaaggcggggug

SEQ ID NO: 6722 - RNA, 18 nt, Artificial Sequence
  Sythetic
gggaaggggagugacuug

SEQ ID NO: 6723 - RNA, 19 nt, Artificial Sequence
  Sythetic
agggaaggggagugacuug

SEQ ID NO: 6724 - RNA, 20 nt, Artificial Sequence
  Sythetic
cagggaaggggagugacuug

SEQ ID NO: 6725 - RNA, 21 nt, Artificial Sequence
  Sythetic
ccagggaaggggagugacuug

SEQ ID NO: 6726 - RNA, 22 nt, Artificial Sequence
  Sythetic
cccagggaaggggagugacuug

SEQ ID NO: 6727 - RNA, 23 nt, Artificial Sequence
  Sythetic
gcccagggaaggggagugacuug

SEQ ID NO: 6728 - RNA, 24 nt, Artificial Sequence
  Sythetic
ggcccagggaaggggagugacuug

SEQ ID NO: 6729 - RNA, 18 nt, Artificial Sequence
  Sythetic
aggcauuuccuaaguuug

SEQ ID NO: 6730 - RNA, 19 nt, Artificial Sequence
  Sythetic
gaggcauuuccuaaguuug

SEQ ID NO: 6731 - RNA, 20 nt, Artificial Sequence
  Sythetic
agaggcauuuccuaaguuug

SEQ ID NO: 6732 - RNA, 21 nt, Artificial Sequence
  Sythetic
cagaggcauuuccuaaguuug

SEQ ID NO: 6733 - RNA, 22 nt, Artificial Sequence
  Sythetic
ccagaggcauuuccuaaguuug

SEQ ID NO: 6734 - RNA, 23 nt, Artificial Sequence
  Sythetic
cccagaggcauuuccuaaguuug

SEQ ID NO: 6735 - RNA, 24 nt, Artificial Sequence
  Sythetic
ucccagaggcauuuccuaaguuug

SEQ ID NO: 6736 - RNA, 18 nt, Artificial Sequence
  Sythetic
ggaguaaagauccuuccu

SEQ ID NO: 6737 - RNA, 19 nt, Artificial Sequence
  Sythetic
aggaguaaagauccuuccu

SEQ ID NO: 6738 - RNA, 20 nt, Artificial Sequence
  Sythetic
aaggaguaaagauccuuccu

SEQ ID NO: 6739 - RNA, 21 nt, Artificial Sequence
  Sythetic
aaaggaguaaagauccuuccu

SEQ ID NO: 6740 - RNA, 22 nt, Artificial Sequence
  Sythetic
aaaaggaguaaagauccuuccu

SEQ ID NO: 6741 - RNA, 23 nt, Artificial Sequence
  Sythetic
uaaaaggaguaaagauccuuccu

SEQ ID NO: 6742 - RNA, 24 nt, Artificial Sequence
  Sythetic
guaaaaggaguaaagauccuuccu

SEQ ID NO: 6743 - RNA, 18 nt, Artificial Sequence
  Sythetic
cuuuuauaaaaacacgcu

SEQ ID NO: 6744 - RNA, 19 nt, Artificial Sequence
  Sythetic
acuuuuauaaaaacacgcu

SEQ ID NO: 6745 - RNA, 20 nt, Artificial Sequence
  Sythetic
gacuuuuauaaaaacacgcu

SEQ ID NO: 6746 - RNA, 21 nt, Artificial Sequence
  Sythetic
ggacuuuuauaaaaacacgcu

SEQ ID NO: 6747 - RNA, 22 nt, Artificial Sequence
  Sythetic
cggacuuuuauaaaaacacgcu

SEQ ID NO: 6748 - RNA, 23 nt, Artificial Sequence
  Sythetic
ccggacuuuuauaaaaacacgcu

SEQ ID NO: 6749 - RNA, 24 nt, Artificial Sequence
  Sythetic
gccggacuuuuauaaaaacacgcu

SEQ ID NO: 6750 - RNA, 18 nt, Artificial Sequence
  Sythetic
uggccgcuucugcccgcu

SEQ ID NO: 6751 - RNA, 19 nt, Artificial Sequence
  Sythetic
cuggccgcuucugcccgcu

SEQ ID NO: 6752 - RNA, 20 nt, Artificial Sequence
  Sythetic
ccuggccgcuucugcccgcu

SEQ ID NO: 6753 - RNA, 21 nt, Artificial Sequence
  Sythetic
uccuggccgcuucugcccgcu

SEQ ID NO: 6754 - RNA, 22 nt, Artificial Sequence
  Sythetic
guccuggccgcuucugcccgcu

SEQ ID NO: 6755 - RNA, 23 nt, Artificial Sequence
  Sythetic
uguccuggccgcuucugcccgcu

SEQ ID NO: 6756 - RNA, 24 nt, Artificial Sequence
  Sythetic
auguccuggccgcuucugcccgcu

SEQ ID NO: 6757 - RNA, 18 nt, Artificial Sequence
  Sythetic
gcggagaggugcgcggcu

SEQ ID NO: 6758 - RNA, 19 nt, Artificial Sequence
  Sythetic
ggcggagaggugcgcggcu

SEQ ID NO: 6759 - RNA, 20 nt, Artificial Sequence
  Sythetic
gggcggagaggugcgcggcu

SEQ ID NO: 6760 - RNA, 21 nt, Artificial Sequence
  Sythetic
ggggcggagaggugcgcggcu

SEQ ID NO: 6761 - RNA, 22 nt, Artificial Sequence
  Sythetic
cggggcggagaggugcgcggcu

SEQ ID NO: 6762 - RNA, 23 nt, Artificial Sequence
  Sythetic
gcggggcggagaggugcgcggcu

SEQ ID NO: 6763 - RNA, 24 nt, Artificial Sequence
  Sythetic
ggcggggcggagaggugcgcggcu

SEQ ID NO: 6764 - RNA, 18 nt, Artificial Sequence
  Sythetic
aggugggaagcgcgggcu

SEQ ID NO: 6765 - RNA, 19 nt, Artificial Sequence
  Sythetic
caggugggaagcgcgggcu

SEQ ID NO: 6766 - RNA, 20 nt, Artificial Sequence
  Sythetic
acaggugggaagcgcgggcu

SEQ ID NO: 6767 - RNA, 21 nt, Artificial Sequence
  Sythetic
gacaggugggaagcgcgggcu

SEQ ID NO: 6768 - RNA, 22 nt, Artificial Sequence
  Sythetic
agacaggugggaagcgcgggcu

SEQ ID NO: 6769 - RNA, 23 nt, Artificial Sequence
  Sythetic
aagacaggugggaagcgcgggcu

SEQ ID NO: 6770 - RNA, 24 nt, Artificial Sequence
  Sythetic
gaagacaggugggaagcgcgggcu

SEQ ID NO: 6771 - RNA, 18 nt, Artificial Sequence
  Sythetic
cagaggcauuuccuaagu

SEQ ID NO: 6772 - RNA, 19 nt, Artificial Sequence
  Sythetic
ccagaggcauuuccuaagu

SEQ ID NO: 6773 - RNA, 20 nt, Artificial Sequence
  Sythetic
cccagaggcauuuccuaagu

SEQ ID NO: 6774 - RNA, 21 nt, Artificial Sequence
  Sythetic
ucccagaggcauuuccuaagu

SEQ ID NO: 6775 - RNA, 22 nt, Artificial Sequence
  Sythetic
cucccagaggcauuuccuaagu

SEQ ID NO: 6776 - RNA, 23 nt, Artificial Sequence
  Sythetic
ccucccagaggcauuuccuaagu

SEQ ID NO: 6777 - RNA, 24 nt, Artificial Sequence
  Sythetic
accucccagaggcauuuccuaagu

SEQ ID NO: 6778 - RNA, 18 nt, Artificial Sequence
  Sythetic
ggguggucgguagugagu

SEQ ID NO: 6779 - RNA, 19 nt, Artificial Sequence
  Sythetic
cggguggucgguagugagu

SEQ ID NO: 6780 - RNA, 20 nt, Artificial Sequence
  Sythetic
gcggguggucgguagugagu

SEQ ID NO: 6781 - RNA, 21 nt, Artificial Sequence
  Sythetic
ugcggguggucgguagugagu

SEQ ID NO: 6782 - RNA, 22 nt, Artificial Sequence
  Sythetic
uugcggguggucgguagugagu

SEQ ID NO: 6783 - RNA, 23 nt, Artificial Sequence
  Sythetic
uuugcggguggucgguagugagu

SEQ ID NO: 6784 - RNA, 24 nt, Artificial Sequence
  Sythetic
guuugcggguggucgguagugagu

SEQ ID NO: 6785 - RNA, 18 nt, Artificial Sequence
  Sythetic
augcgccugaagacaggu

SEQ ID NO: 6786 - RNA, 19 nt, Artificial Sequence
  Sythetic
gaugcgccugaagacaggu

SEQ ID NO: 6787 - RNA, 20 nt, Artificial Sequence
  Sythetic
ggaugcgccugaagacaggu

SEQ ID NO: 6788 - RNA, 21 nt, Artificial Sequence
  Sythetic
gggaugcgccugaagacaggu

SEQ ID NO: 6789 - RNA, 22 nt, Artificial Sequence
  Sythetic
cgggaugcgccugaagacaggu

SEQ ID NO: 6790 - RNA, 23 nt, Artificial Sequence
  Sythetic
gcgggaugcgccugaagacaggu

SEQ ID NO: 6791 - RNA, 24 nt, Artificial Sequence
  Sythetic
agcgggaugcgccugaagacaggu

SEQ ID NO: 6792 - RNA, 18 nt, Artificial Sequence
  Sythetic
ggagggagaaggcggggu

SEQ ID NO: 6793 - RNA, 19 nt, Artificial Sequence
  Sythetic
gggagggagaaggcggggu

SEQ ID NO: 6794 - RNA, 20 nt, Artificial Sequence
  Sythetic
ggggagggagaaggcggggu

SEQ ID NO: 6795 - RNA, 21 nt, Artificial Sequence
  Sythetic
cggggagggagaaggcggggu

SEQ ID NO: 6796 - RNA, 22 nt, Artificial Sequence
  Sythetic
gcggggagggagaaggcggggu

SEQ ID NO: 6797 - RNA, 23 nt, Artificial Sequence
  Sythetic
ggcggggagggagaaggcggggu

SEQ ID NO: 6798 - RNA, 24 nt, Artificial Sequence
  Sythetic
gggcggggagggagaaggcggggu

SEQ ID NO: 6799 - RNA, 18 nt, Artificial Sequence
  Sythetic
cagcagacgcagcccauu

SEQ ID NO: 6800 - RNA, 19 nt, Artificial Sequence
  Sythetic
ucagcagacgcagcccauu

SEQ ID NO: 6801 - RNA, 20 nt, Artificial Sequence
  Sythetic
uucagcagacgcagcccauu

SEQ ID NO: 6802 - RNA, 21 nt, Artificial Sequence
  Sythetic
uuucagcagacgcagcccauu

SEQ ID NO: 6803 - RNA, 22 nt, Artificial Sequence
  Sythetic
cuuucagcagacgcagcccauu

SEQ ID NO: 6804 - RNA, 23 nt, Artificial Sequence
  Sythetic
gcuuucagcagacgcagcccauu

SEQ ID NO: 6805 - RNA, 24 nt, Artificial Sequence
  Sythetic
cgcuuucagcagacgcagcccauu

SEQ ID NO: 6806 - RNA, 18 nt, Artificial Sequence
  Sythetic
gaguaaagauccuuccuu

SEQ ID NO: 6807 - RNA, 19 nt, Artificial Sequence
  Sythetic
ggaguaaagauccuuccuu

SEQ ID NO: 6808 - RNA, 20 nt, Artificial Sequence
  Sythetic
aggaguaaagauccuuccuu

SEQ ID NO: 6809 - RNA, 21 nt, Artificial Sequence
  Sythetic
aaggaguaaagauccuuccuu

SEQ ID NO: 6810 - RNA, 22 nt, Artificial Sequence
  Sythetic
aaaggaguaaagauccuuccuu

SEQ ID NO: 6811 - RNA, 23 nt, Artificial Sequence
  Sythetic
aaaaggaguaaagauccuuccuu

SEQ ID NO: 6812 - RNA, 24 nt, Artificial Sequence
  Sythetic
uaaaaggaguaaagauccuuccuu

SEQ ID NO: 6813 - RNA, 18 nt, Artificial Sequence
  Sythetic
cggagaggugcgcggcuu

SEQ ID NO: 6814 - RNA, 19 nt, Artificial Sequence
  Sythetic
gcggagaggugcgcggcuu

SEQ ID NO: 6815 - RNA, 20 nt, Artificial Sequence
  Sythetic
ggcggagaggugcgcggcuu

SEQ ID NO: 6816 - RNA, 21 nt, Artificial Sequence
  Sythetic
gggcggagaggugcgcggcuu

SEQ ID NO: 6817 - RNA, 22 nt, Artificial Sequence
  Sythetic
ggggcggagaggugcgcggcuu

SEQ ID NO: 6818 - RNA, 23 nt, Artificial Sequence
  Sythetic
cggggcggagaggugcgcggcuu

SEQ ID NO: 6819 - RNA, 24 nt, Artificial Sequence
  Sythetic
gcggggcggagaggugcgcggcuu

SEQ ID NO: 6820 - RNA, 18 nt, Artificial Sequence
  Sythetic
gaggcauuuccuaaguuu

SEQ ID NO: 6821 - RNA, 19 nt, Artificial Sequence
  Sythetic
agaggcauuuccuaaguuu

SEQ ID NO: 6822 - RNA, 20 nt, Artificial Sequence
  Sythetic
cagaggcauuuccuaaguuu

SEQ ID NO: 6823 - RNA, 21 nt, Artificial Sequence
  Sythetic
ccagaggcauuuccuaaguuu

SEQ ID NO: 6824 - RNA, 22 nt, Artificial Sequence
  Sythetic
cccagaggcauuuccuaaguuu

SEQ ID NO: 6825 - RNA, 23 nt, Artificial Sequence
  Sythetic
ucccagaggcauuuccuaaguuu

SEQ ID NO: 6826 - RNA, 24 nt, Artificial Sequence
  Sythetic
cucccagaggcauuuccuaaguuu

SEQ ID NO: 6827 - RNA, 18 nt, Artificial Sequence
  Sythetic
ccuuucggugacccuuuu

SEQ ID NO: 6828 - RNA, 19 nt, Artificial Sequence
  Sythetic
uccuuucggugacccuuuu

SEQ ID NO: 6829 - RNA, 20 nt, Artificial Sequence
  Sythetic
cuccuuucggugacccuuuu

SEQ ID NO: 6830 - RNA, 21 nt, Artificial Sequence
  Sythetic
acuccuuucggugacccuuuu

SEQ ID NO: 6831 - RNA, 22 nt, Artificial Sequence
  Sythetic
aacuccuuucggugacccuuuu

SEQ ID NO: 6832 - RNA, 23 nt, Artificial Sequence
  Sythetic
aaacuccuuucggugacccuuuu

SEQ ID NO: 6833 - RNA, 24 nt, Artificial Sequence
  Sythetic
aaaacuccuuucggugacccuuuu

SEQ ID NO: 6834 - RNA, 18 nt, Artificial Sequence
  Sythetic
aaggauggacgcgccaca

SEQ ID NO: 6835 - RNA, 19 nt, Artificial Sequence
  Sythetic
caaggauggacgcgccaca

SEQ ID NO: 6836 - RNA, 20 nt, Artificial Sequence
  Sythetic
gcaaggauggacgcgccaca

SEQ ID NO: 6837 - RNA, 21 nt, Artificial Sequence
  Sythetic
agcaaggauggacgcgccaca

SEQ ID NO: 6838 - RNA, 22 nt, Artificial Sequence
  Sythetic
uagcaaggauggacgcgccaca

SEQ ID NO: 6839 - RNA, 23 nt, Artificial Sequence
  Sythetic
uuagcaaggauggacgcgccaca

SEQ ID NO: 6840 - RNA, 24 nt, Artificial Sequence
  Sythetic
uuuagcaaggauggacgcgccaca

SEQ ID NO: 6841 - RNA, 18 nt, Artificial Sequence
  Sythetic
gcagaagcggccaggaca

SEQ ID NO: 6842 - RNA, 19 nt, Artificial Sequence
  Sythetic
ggcagaagcggccaggaca

SEQ ID NO: 6843 - RNA, 20 nt, Artificial Sequence
  Sythetic
gggcagaagcggccaggaca

SEQ ID NO: 6844 - RNA, 21 nt, Artificial Sequence
  Sythetic
cgggcagaagcggccaggaca

SEQ ID NO: 6845 - RNA, 22 nt, Artificial Sequence
  Sythetic
gcgggcagaagcggccaggaca

SEQ ID NO: 6846 - RNA, 23 nt, Artificial Sequence
  Sythetic
agcgggcagaagcggccaggaca

SEQ ID NO: 6847 - RNA, 24 nt, Artificial Sequence
  Sythetic
gagcgggcagaagcggccaggaca

SEQ ID NO: 6848 - RNA, 18 nt, Artificial Sequence
  Sythetic
gagaaccagcgguuacca

SEQ ID NO: 6849 - RNA, 19 nt, Artificial Sequence
  Sythetic
ggagaaccagcgguuacca

SEQ ID NO: 6850 - RNA, 20 nt, Artificial Sequence
  Sythetic
uggagaaccagcgguuacca

SEQ ID NO: 6851 - RNA, 21 nt, Artificial Sequence
  Sythetic
cuggagaaccagcgguuacca

SEQ ID NO: 6852 - RNA, 22 nt, Artificial Sequence
  Sythetic
ucuggagaaccagcgguuacca

SEQ ID NO: 6853 - RNA, 23 nt, Artificial Sequence
  Sythetic
aucuggagaaccagcgguuacca

SEQ ID NO: 6854 - RNA, 24 nt, Artificial Sequence
  Sythetic
caucuggagaaccagcgguuacca

SEQ ID NO: 6855 - RNA, 18 nt, Artificial Sequence
  Sythetic
gcaaggauggacgcgcca

SEQ ID NO: 6856 - RNA, 19 nt, Artificial Sequence
  Sythetic
agcaaggauggacgcgcca

SEQ ID NO: 6857 - RNA, 20 nt, Artificial Sequence
  Sythetic
uagcaaggauggacgcgcca

SEQ ID NO: 6858 - RNA, 21 nt, Artificial Sequence
  Sythetic
uuagcaaggauggacgcgcca

SEQ ID NO: 6859 - RNA, 22 nt, Artificial Sequence
  Sythetic
uuuagcaaggauggacgcgcca

SEQ ID NO: 6860 - RNA, 23 nt, Artificial Sequence
  Sythetic
cuuuagcaaggauggacgcgcca

SEQ ID NO: 6861 - RNA, 24 nt, Artificial Sequence
  Sythetic
acuuuagcaaggauggacgcgcca

SEQ ID NO: 6862 - RNA, 18 nt, Artificial Sequence
  Sythetic
auucugugcacaagugca

SEQ ID NO: 6863 - RNA, 19 nt, Artificial Sequence
  Sythetic
cauucugugcacaagugca

SEQ ID NO: 6864 - RNA, 20 nt, Artificial Sequence
  Sythetic
acauucugugcacaagugca

SEQ ID NO: 6865 - RNA, 21 nt, Artificial Sequence
  Sythetic
aacauucugugcacaagugca

SEQ ID NO: 6866 - RNA, 22 nt, Artificial Sequence
  Sythetic
gaacauucugugcacaagugca

SEQ ID NO: 6867 - RNA, 23 nt, Artificial Sequence
  Sythetic
agaacauucugugcacaagugca

SEQ ID NO: 6868 - RNA, 24 nt, Artificial Sequence
  Sythetic
aagaacauucugugcacaagugca

SEQ ID NO: 6869 - RNA, 18 nt, Artificial Sequence
  Sythetic
uacuccaaaaaaggguca

SEQ ID NO: 6870 - RNA, 19 nt, Artificial Sequence
  Sythetic
guacuccaaaaaaggguca

SEQ ID NO: 6871 - RNA, 20 nt, Artificial Sequence
  Sythetic
cguacuccaaaaaaggguca

SEQ ID NO: 6872 - RNA, 21 nt, Artificial Sequence
  Sythetic
ccguacuccaaaaaaggguca

SEQ ID NO: 6873 - RNA, 22 nt, Artificial Sequence
  Sythetic
cccguacuccaaaaaaggguca

SEQ ID NO: 6874 - RNA, 23 nt, Artificial Sequence
  Sythetic
acccguacuccaaaaaaggguca

SEQ ID NO: 6875 - RNA, 24 nt, Artificial Sequence
  Sythetic
uacccguacuccaaaaaaggguca

SEQ ID NO: 6876 - RNA, 18 nt, Artificial Sequence
  Sythetic
ugagucgaggagaaacga

SEQ ID NO: 6877 - RNA, 19 nt, Artificial Sequence
  Sythetic
gugagucgaggagaaacga

SEQ ID NO: 6878 - RNA, 20 nt, Artificial Sequence
  Sythetic
ugugagucgaggagaaacga

SEQ ID NO: 6879 - RNA, 21 nt, Artificial Sequence
  Sythetic
cugugagucgaggagaaacga

SEQ ID NO: 6880 - RNA, 22 nt, Artificial Sequence
  Sythetic
ucugugagucgaggagaaacga

SEQ ID NO: 6881 - RNA, 23 nt, Artificial Sequence
  Sythetic
cucugugagucgaggagaaacga

SEQ ID NO: 6882 - RNA, 24 nt, Artificial Sequence
  Sythetic
ucucugugagucgaggagaaacga

SEQ ID NO: 6883 - RNA, 18 nt, Artificial Sequence
  Sythetic
ccaaaaaagggucaccga

SEQ ID NO: 6884 - RNA, 19 nt, Artificial Sequence
  Sythetic
uccaaaaaagggucaccga

SEQ ID NO: 6885 - RNA, 20 nt, Artificial Sequence
  Sythetic
cuccaaaaaagggucaccga

SEQ ID NO: 6886 - RNA, 21 nt, Artificial Sequence
  Sythetic
acuccaaaaaagggucaccga

SEQ ID NO: 6887 - RNA, 22 nt, Artificial Sequence
  Sythetic
uacuccaaaaaagggucaccga

SEQ ID NO: 6888 - RNA, 23 nt, Artificial Sequence
  Sythetic
guacuccaaaaaagggucaccga

SEQ ID NO: 6889 - RNA, 24 nt, Artificial Sequence
  Sythetic
cguacuccaaaaaagggucaccga

SEQ ID NO: 6890 - RNA, 18 nt, Artificial Sequence
  Sythetic
agcgcagccccucuccga

SEQ ID NO: 6891 - RNA, 19 nt, Artificial Sequence
  Sythetic
gagcgcagccccucuccga

SEQ ID NO: 6892 - RNA, 20 nt, Artificial Sequence
  Sythetic
agagcgcagccccucuccga

SEQ ID NO: 6893 - RNA, 21 nt, Artificial Sequence
  Sythetic
uagagcgcagccccucuccga

SEQ ID NO: 6894 - RNA, 22 nt, Artificial Sequence
  Sythetic
uuagagcgcagccccucuccga

SEQ ID NO: 6895 - RNA, 23 nt, Artificial Sequence
  Sythetic
cuuagagcgcagccccucuccga

SEQ ID NO: 6896 - RNA, 24 nt, Artificial Sequence
  Sythetic
acuuagagcgcagccccucuccga

SEQ ID NO: 6897 - RNA, 18 nt, Artificial Sequence
  Sythetic
gguggggggggagcagga

SEQ ID NO: 6898 - RNA, 19 nt, Artificial Sequence
  Sythetic
ggguggggggggagcagga

SEQ ID NO: 6899 - RNA, 20 nt, Artificial Sequence
  Sythetic
uggguggggggggagcagga

SEQ ID NO: 6900 - RNA, 21 nt, Artificial Sequence
  Sythetic
guggguggggggggagcagga

SEQ ID NO: 6901 - RNA, 22 nt, Artificial Sequence
  Sythetic
gguggguggggggggagcagga

SEQ ID NO: 6902 - RNA, 23 nt, Artificial Sequence
  Sythetic
ggguggguggggggggagcagga

SEQ ID NO: 6903 - RNA, 24 nt, Artificial Sequence
  Sythetic
cggguggguggggggggagcagga

SEQ ID NO: 6904 - RNA, 18 nt, Artificial Sequence
  Sythetic
cgaggagaaacgacugga

SEQ ID NO: 6905 - RNA, 19 nt, Artificial Sequence
  Sythetic
ucgaggagaaacgacugga

SEQ ID NO: 6906 - RNA, 20 nt, Artificial Sequence
  Sythetic
gucgaggagaaacgacugga

SEQ ID NO: 6907 - RNA, 21 nt, Artificial Sequence
  Sythetic
agucgaggagaaacgacugga

SEQ ID NO: 6908 - RNA, 22 nt, Artificial Sequence
  Sythetic
gagucgaggagaaacgacugga

SEQ ID NO: 6909 - RNA, 23 nt, Artificial Sequence
  Sythetic
ugagucgaggagaaacgacugga

SEQ ID NO: 6910 - RNA, 24 nt, Artificial Sequence
  Sythetic
gugagucgaggagaaacgacugga

SEQ ID NO: 6911 - RNA, 18 nt, Artificial Sequence
  Sythetic
acuccuuuuaccuccuga

SEQ ID NO: 6912 - RNA, 19 nt, Artificial Sequence
  Sythetic
uacuccuuuuaccuccuga

SEQ ID NO: 6913 - RNA, 20 nt, Artificial Sequence
  Sythetic
uuacuccuuuuaccuccuga

SEQ ID NO: 6914 - RNA, 21 nt, Artificial Sequence
  Sythetic
uuuacuccuuuuaccuccuga

SEQ ID NO: 6915 - RNA, 22 nt, Artificial Sequence
  Sythetic
cuuuacuccuuuuaccuccuga

SEQ ID NO: 6916 - RNA, 23 nt, Artificial Sequence
  Sythetic
ucuuuacuccuuuuaccuccuga

SEQ ID NO: 6917 - RNA, 24 nt, Artificial Sequence
  Sythetic
aucuuuacuccuuuuaccuccuga

SEQ ID NO: 6918 - RNA, 18 nt, Artificial Sequence
  Sythetic
gagucgaggagaaacgac

SEQ ID NO: 6919 - RNA, 19 nt, Artificial Sequence
  Sythetic
ugagucgaggagaaacgac

SEQ ID NO: 6920 - RNA, 20 nt, Artificial Sequence
  Sythetic
gugagucgaggagaaacgac

SEQ ID NO: 6921 - RNA, 21 nt, Artificial Sequence
  Sythetic
ugugagucgaggagaaacgac

SEQ ID NO: 6922 - RNA, 22 nt, Artificial Sequence
  Sythetic
cugugagucgaggagaaacgac

SEQ ID NO: 6923 - RNA, 23 nt, Artificial Sequence
  Sythetic
ucugugagucgaggagaaacgac

SEQ ID NO: 6924 - RNA, 24 nt, Artificial Sequence
  Sythetic
cucugugagucgaggagaaacgac

SEQ ID NO: 6925 - RNA, 18 nt, Artificial Sequence
  Sythetic
ggagaaccagcgguuacc

SEQ ID NO: 6926 - RNA, 19 nt, Artificial Sequence
  Sythetic
uggagaaccagcgguuacc

SEQ ID NO: 6927 - RNA, 20 nt, Artificial Sequence
  Sythetic
cuggagaaccagcgguuacc

SEQ ID NO: 6928 - RNA, 21 nt, Artificial Sequence
  Sythetic
ucuggagaaccagcgguuacc

SEQ ID NO: 6929 - RNA, 22 nt, Artificial Sequence
  Sythetic
aucuggagaaccagcgguuacc

SEQ ID NO: 6930 - RNA, 23 nt, Artificial Sequence
  Sythetic
caucuggagaaccagcgguuacc

SEQ ID NO: 6931 - RNA, 24 nt, Artificial Sequence
  Sythetic
gcaucuggagaaccagcgguuacc

SEQ ID NO: 6932 - RNA, 18 nt, Artificial Sequence
  Sythetic
cgcaaacagcaggguccc

SEQ ID NO: 6933 - RNA, 19 nt, Artificial Sequence
  Sythetic
ccgcaaacagcaggguccc

SEQ ID NO: 6934 - RNA, 20 nt, Artificial Sequence
  Sythetic
cccgcaaacagcaggguccc

SEQ ID NO: 6935 - RNA, 21 nt, Artificial Sequence
  Sythetic
acccgcaaacagcaggguccc

SEQ ID NO: 6936 - RNA, 22 nt, Artificial Sequence
  Sythetic
cacccgcaaacagcaggguccc

SEQ ID NO: 6937 - RNA, 23 nt, Artificial Sequence
  Sythetic
ccacccgcaaacagcaggguccc

SEQ ID NO: 6938 - RNA, 24 nt, Artificial Sequence
  Sythetic
accacccgcaaacagcaggguccc

SEQ ID NO: 6939 - RNA, 18 nt, Artificial Sequence
  Sythetic
agguagcaaagugacgcc

SEQ ID NO: 6940 - RNA, 19 nt, Artificial Sequence
  Sythetic
cagguagcaaagugacgcc

SEQ ID NO: 6941 - RNA, 20 nt, Artificial Sequence
  Sythetic
gcagguagcaaagugacgcc

SEQ ID NO: 6942 - RNA, 21 nt, Artificial Sequence
  Sythetic
agcagguagcaaagugacgcc

SEQ ID NO: 6943 - RNA, 22 nt, Artificial Sequence
  Sythetic
cagcagguagcaaagugacgcc

SEQ ID NO: 6944 - RNA, 23 nt, Artificial Sequence
  Sythetic
gcagcagguagcaaagugacgcc

SEQ ID NO: 6945 - RNA, 24 nt, Artificial Sequence
  Sythetic
ggcagcagguagcaaagugacgcc

SEQ ID NO: 6946 - RNA, 18 nt, Artificial Sequence
  Sythetic
gaaggcgugcgcgcugcc

SEQ ID NO: 6947 - RNA, 19 nt, Artificial Sequence
  Sythetic
agaaggcgugcgcgcugcc

SEQ ID NO: 6948 - RNA, 20 nt, Artificial Sequence
  Sythetic
gagaaggcgugcgcgcugcc

SEQ ID NO: 6949 - RNA, 21 nt, Artificial Sequence
  Sythetic
agagaaggcgugcgcgcugcc

SEQ ID NO: 6950 - RNA, 22 nt, Artificial Sequence
  Sythetic
cagagaaggcgugcgcgcugcc

SEQ ID NO: 6951 - RNA, 23 nt, Artificial Sequence
  Sythetic
gcagagaaggcgugcgcgcugcc

SEQ ID NO: 6952 - RNA, 24 nt, Artificial Sequence
  Sythetic
ugcagagaaggcgugcgcgcugcc

SEQ ID NO: 6953 - RNA, 18 nt, Artificial Sequence
  Sythetic
gcaagucacuccccuucc

SEQ ID NO: 6954 - RNA, 19 nt, Artificial Sequence
  Sythetic
agcaagucacuccccuucc

SEQ ID NO: 6955 - RNA, 20 nt, Artificial Sequence
  Sythetic
cagcaagucacuccccuucc

SEQ ID NO: 6956 - RNA, 21 nt, Artificial Sequence
  Sythetic
ccagcaagucacuccccuucc

SEQ ID NO: 6957 - RNA, 22 nt, Artificial Sequence
  Sythetic
uccagcaagucacuccccuucc

SEQ ID NO: 6958 - RNA, 23 nt, Artificial Sequence
  Sythetic
cuccagcaagucacuccccuucc

SEQ ID NO: 6959 - RNA, 24 nt, Artificial Sequence
  Sythetic
acuccagcaagucacuccccuucc

SEQ ID NO: 6960 - RNA, 18 nt, Artificial Sequence
  Sythetic
agaccaccggucucuucc

SEQ ID NO: 6961 - RNA, 19 nt, Artificial Sequence
  Sythetic
cagaccaccggucucuucc

SEQ ID NO: 6962 - RNA, 20 nt, Artificial Sequence
  Sythetic
ucagaccaccggucucuucc

SEQ ID NO: 6963 - RNA, 21 nt, Artificial Sequence
  Sythetic
cucagaccaccggucucuucc

SEQ ID NO: 6964 - RNA, 22 nt, Artificial Sequence
  Sythetic
acucagaccaccggucucuucc

SEQ ID NO: 6965 - RNA, 23 nt, Artificial Sequence
  Sythetic
gacucagaccaccggucucuucc

SEQ ID NO: 6966 - RNA, 24 nt, Artificial Sequence
  Sythetic
ggacucagaccaccggucucuucc

SEQ ID NO: 6967 - RNA, 18 nt, Artificial Sequence
  Sythetic
gcugcgucugcugaaagc

SEQ ID NO: 6968 - RNA, 19 nt, Artificial Sequence
  Sythetic
ggcugcgucugcugaaagc

SEQ ID NO: 6969 - RNA, 20 nt, Artificial Sequence
  Sythetic
gggcugcgucugcugaaagc

SEQ ID NO: 6970 - RNA, 21 nt, Artificial Sequence
  Sythetic
ugggcugcgucugcugaaagc

SEQ ID NO: 6971 - RNA, 22 nt, Artificial Sequence
  Sythetic
augggcugcgucugcugaaagc

SEQ ID NO: 6972 - RNA, 23 nt, Artificial Sequence
  Sythetic
aaugggcugcgucugcugaaagc

SEQ ID NO: 6973 - RNA, 24 nt, Artificial Sequence
  Sythetic
gaaugggcugcgucugcugaaagc

SEQ ID NO: 6974 - RNA, 18 nt, Artificial Sequence
  Sythetic
ugcgucugcugaaagcgc

SEQ ID NO: 6975 - RNA, 19 nt, Artificial Sequence
  Sythetic
cugcgucugcugaaagcgc

SEQ ID NO: 6976 - RNA, 20 nt, Artificial Sequence
  Sythetic
gcugcgucugcugaaagcgc

SEQ ID NO: 6977 - RNA, 21 nt, Artificial Sequence
  Sythetic
ggcugcgucugcugaaagcgc

SEQ ID NO: 6978 - RNA, 22 nt, Artificial Sequence
  Sythetic
gggcugcgucugcugaaagcgc

SEQ ID NO: 6979 - RNA, 23 nt, Artificial Sequence
  Sythetic
ugggcugcgucugcugaaagcgc

SEQ ID NO: 6980 - RNA, 24 nt, Artificial Sequence
  Sythetic
augggcugcgucugcugaaagcgc

SEQ ID NO: 6981 - RNA, 18 nt, Artificial Sequence
  Sythetic
gcggcgcaugcgccgcgc

SEQ ID NO: 6982 - RNA, 19 nt, Artificial Sequence
  Sythetic
agcggcgcaugcgccgcgc

SEQ ID NO: 6983 - RNA, 20 nt, Artificial Sequence
  Sythetic
cagcggcgcaugcgccgcgc

SEQ ID NO: 6984 - RNA, 21 nt, Artificial Sequence
  Sythetic
ccagcggcgcaugcgccgcgc

SEQ ID NO: 6985 - RNA, 22 nt, Artificial Sequence
  Sythetic
cccagcggcgcaugcgccgcgc

SEQ ID NO: 6986 - RNA, 23 nt, Artificial Sequence
  Sythetic
ccccagcggcgcaugcgccgcgc

SEQ ID NO: 6987 - RNA, 24 nt, Artificial Sequence
  Sythetic
gccccagcggcgcaugcgccgcgc

SEQ ID NO: 6988 - RNA, 18 nt, Artificial Sequence
  Sythetic
cgagcgggcagaagcggc

SEQ ID NO: 6989 - RNA, 19 nt, Artificial Sequence
  Sythetic
ccgagcgggcagaagcggc

SEQ ID NO: 6990 - RNA, 20 nt, Artificial Sequence
  Sythetic
uccgagcgggcagaagcggc

SEQ ID NO: 6991 - RNA, 21 nt, Artificial Sequence
  Sythetic
cuccgagcgggcagaagcggc

SEQ ID NO: 6992 - RNA, 22 nt, Artificial Sequence
  Sythetic
ucuccgagcgggcagaagcggc

SEQ ID NO: 6993 - RNA, 23 nt, Artificial Sequence
  Sythetic
cucuccgagcgggcagaagcggc

SEQ ID NO: 6994 - RNA, 24 nt, Artificial Sequence
  Sythetic
ccucuccgagcgggcagaagcggc

SEQ ID NO: 6995 - RNA, 18 nt, Artificial Sequence
  Sythetic
uaaaaguccggccgcggc

SEQ ID NO: 6996 - RNA, 19 nt, Artificial Sequence
  Sythetic
auaaaaguccggccgcggc

SEQ ID NO: 6997 - RNA, 20 nt, Artificial Sequence
  Sythetic
uauaaaaguccggccgcggc

SEQ ID NO: 6998 - RNA, 21 nt, Artificial Sequence
  Sythetic
uuauaaaaguccggccgcggc

SEQ ID NO: 6999 - RNA, 22 nt, Artificial Sequence
  Sythetic
uuuauaaaaguccggccgcggc

SEQ ID NO: 7000 - RNA, 23 nt, Artificial Sequence
  Sythetic
uuuuauaaaaguccggccgcggc

SEQ ID NO: 7001 - RNA, 24 nt, Artificial Sequence
  Sythetic
uuuuuauaaaaguccggccgcggc

SEQ ID NO: 7002 - RNA, 18 nt, Artificial Sequence
  Sythetic
uccaguagccaccgcauc

SEQ ID NO: 7003 - RNA, 19 nt, Artificial Sequence
  Sythetic
cuccaguagccaccgcauc

SEQ ID NO: 7004 - RNA, 20 nt, Artificial Sequence
  Sythetic
gcuccaguagccaccgcauc

SEQ ID NO: 7005 - RNA, 21 nt, Artificial Sequence
  Sythetic
ugcuccaguagccaccgcauc

SEQ ID NO: 7006 - RNA, 22 nt, Artificial Sequence
  Sythetic
gugcuccaguagccaccgcauc

SEQ ID NO: 7007 - RNA, 23 nt, Artificial Sequence
  Sythetic
agugcuccaguagccaccgcauc

SEQ ID NO: 7008 - RNA, 24 nt, Artificial Sequence
  Sythetic
gagugcuccaguagccaccgcauc

SEQ ID NO: 7009 - RNA, 18 nt, Artificial Sequence
  Sythetic
aaacuuaggaaaugccuc

SEQ ID NO: 7010 - RNA, 19 nt, Artificial Sequence
  Sythetic
caaacuuaggaaaugccuc

SEQ ID NO: 7011 - RNA, 20 nt, Artificial Sequence
  Sythetic
ucaaacuuaggaaaugccuc

SEQ ID NO: 7012 - RNA, 21 nt, Artificial Sequence
  Sythetic
cucaaacuuaggaaaugccuc

SEQ ID NO: 7013 - RNA, 22 nt, Artificial Sequence
  Sythetic
ccucaaacuuaggaaaugccuc

SEQ ID NO: 7014 - RNA, 23 nt, Artificial Sequence
  Sythetic
cccucaaacuuaggaaaugccuc

SEQ ID NO: 7015 - RNA, 24 nt, Artificial Sequence
  Sythetic
ucccucaaacuuaggaaaugccuc

SEQ ID NO: 7016 - RNA, 18 nt, Artificial Sequence
  Sythetic
ucuuuuucucugugaguc

SEQ ID NO: 7017 - RNA, 19 nt, Artificial Sequence
  Sythetic
aucuuuuucucugugaguc

SEQ ID NO: 7018 - RNA, 20 nt, Artificial Sequence
  Sythetic
aaucuuuuucucugugaguc

SEQ ID NO: 7019 - RNA, 21 nt, Artificial Sequence
  Sythetic
gaaucuuuuucucugugaguc

SEQ ID NO: 7020 - RNA, 22 nt, Artificial Sequence
  Sythetic
ggaaucuuuuucucugugaguc

SEQ ID NO: 7021 - RNA, 23 nt, Artificial Sequence
  Sythetic
uggaaucuuuuucucugugaguc

SEQ ID NO: 7022 - RNA, 24 nt, Artificial Sequence
  Sythetic
uuggaaucuuuuucucugugaguc

SEQ ID NO: 7023 - RNA, 18 nt, Artificial Sequence
  Sythetic
uuuucucugugagucgag

SEQ ID NO: 7024 - RNA, 19 nt, Artificial Sequence
  Sythetic
uuuuucucugugagucgag

SEQ ID NO: 7025 - RNA, 20 nt, Artificial Sequence
  Sythetic
cuuuuucucugugagucgag

SEQ ID NO: 7026 - RNA, 21 nt, Artificial Sequence
  Sythetic
ucuuuuucucugugagucgag

SEQ ID NO: 7027 - RNA, 22 nt, Artificial Sequence
  Sythetic
aucuuuuucucugugagucgag

SEQ ID NO: 7028 - RNA, 23 nt, Artificial Sequence
  Sythetic
aaucuuuuucucugugagucgag

SEQ ID NO: 7029 - RNA, 24 nt, Artificial Sequence
  Sythetic
gaaucuuuuucucugugagucgag

SEQ ID NO: 7030 - RNA, 18 nt, Artificial Sequence
  Sythetic
aaucuuuuucucugugag

SEQ ID NO: 7031 - RNA, 19 nt, Artificial Sequence
  Sythetic
gaaucuuuuucucugugag

SEQ ID NO: 7032 - RNA, 20 nt, Artificial Sequence
  Sythetic
ggaaucuuuuucucugugag

SEQ ID NO: 7033 - RNA, 21 nt, Artificial Sequence
  Sythetic
uggaaucuuuuucucugugag

SEQ ID NO: 7034 - RNA, 22 nt, Artificial Sequence
  Sythetic
uuggaaucuuuuucucugugag

SEQ ID NO: 7035 - RNA, 23 nt, Artificial Sequence
  Sythetic
auuggaaucuuuuucucugugag

SEQ ID NO: 7036 - RNA, 24 nt, Artificial Sequence
  Sythetic
gauuggaaucuuuuucucugugag

SEQ ID NO: 7037 - RNA, 18 nt, Artificial Sequence
  Sythetic
gcagguagcaaagugacg

SEQ ID NO: 7038 - RNA, 19 nt, Artificial Sequence
  Sythetic
agcagguagcaaagugacg

SEQ ID NO: 7039 - RNA, 20 nt, Artificial Sequence
  Sythetic
cagcagguagcaaagugacg

SEQ ID NO: 7040 - RNA, 21 nt, Artificial Sequence
  Sythetic
gcagcagguagcaaagugacg

SEQ ID NO: 7041 - RNA, 22 nt, Artificial Sequence
  Sythetic
ggcagcagguagcaaagugacg

SEQ ID NO: 7042 - RNA, 23 nt, Artificial Sequence
  Sythetic
cggcagcagguagcaaagugacg

SEQ ID NO: 7043 - RNA, 24 nt, Artificial Sequence
  Sythetic
gcggcagcagguagcaaagugacg

SEQ ID NO: 7044 - RNA, 18 nt, Artificial Sequence
  Sythetic
cugcgucugcugaaagcg

SEQ ID NO: 7045 - RNA, 19 nt, Artificial Sequence
  Sythetic
gcugcgucugcugaaagcg

SEQ ID NO: 7046 - RNA, 20 nt, Artificial Sequence
  Sythetic
ggcugcgucugcugaaagcg

SEQ ID NO: 7047 - RNA, 21 nt, Artificial Sequence
  Sythetic
gggcugcgucugcugaaagcg

SEQ ID NO: 7048 - RNA, 22 nt, Artificial Sequence
  Sythetic
ugggcugcgucugcugaaagcg

SEQ ID NO: 7049 - RNA, 23 nt, Artificial Sequence
  Sythetic
augggcugcgucugcugaaagcg

SEQ ID NO: 7050 - RNA, 24 nt, Artificial Sequence
  Sythetic
aaugggcugcgucugcugaaagcg

SEQ ID NO: 7051 - RNA, 18 nt, Artificial Sequence
  Sythetic
aaagcgcggggaauggcg

SEQ ID NO: 7052 - RNA, 19 nt, Artificial Sequence
  Sythetic
gaaagcgcggggaauggcg

SEQ ID NO: 7053 - RNA, 20 nt, Artificial Sequence
  Sythetic
ugaaagcgcggggaauggcg

SEQ ID NO: 7054 - RNA, 21 nt, Artificial Sequence
  Sythetic
cugaaagcgcggggaauggcg

SEQ ID NO: 7055 - RNA, 22 nt, Artificial Sequence
  Sythetic
gcugaaagcgcggggaauggcg

SEQ ID NO: 7056 - RNA, 23 nt, Artificial Sequence
  Sythetic
ugcugaaagcgcggggaauggcg

SEQ ID NO: 7057 - RNA, 24 nt, Artificial Sequence
  Sythetic
cugcugaaagcgcggggaauggcg

SEQ ID NO: 7058 - RNA, 18 nt, Artificial Sequence
  Sythetic
cuuuuucucugugagucg

SEQ ID NO: 7059 - RNA, 19 nt, Artificial Sequence
  Sythetic
ucuuuuucucugugagucg

SEQ ID NO: 7060 - RNA, 20 nt, Artificial Sequence
  Sythetic
aucuuuuucucugugagucg

SEQ ID NO: 7061 - RNA, 21 nt, Artificial Sequence
  Sythetic
aaucuuuuucucugugagucg

SEQ ID NO: 7062 - RNA, 22 nt, Artificial Sequence
  Sythetic
gaaucuuuuucucugugagucg

SEQ ID NO: 7063 - RNA, 23 nt, Artificial Sequence
  Sythetic
ggaaucuuuuucucugugagucg

SEQ ID NO: 7064 - RNA, 24 nt, Artificial Sequence
  Sythetic
uggaaucuuuuucucugugagucg

SEQ ID NO: 7065 - RNA, 18 nt, Artificial Sequence
  Sythetic
ccauccacuuuagcaagg

SEQ ID NO: 7066 - RNA, 19 nt, Artificial Sequence
  Sythetic
uccauccacuuuagcaagg

SEQ ID NO: 7067 - RNA, 20 nt, Artificial Sequence
  Sythetic
uuccauccacuuuagcaagg

SEQ ID NO: 7068 - RNA, 21 nt, Artificial Sequence
  Sythetic
auuccauccacuuuagcaagg

SEQ ID NO: 7069 - RNA, 22 nt, Artificial Sequence
  Sythetic
aauuccauccacuuuagcaagg

SEQ ID NO: 7070 - RNA, 23 nt, Artificial Sequence
  Sythetic
gaauuccauccacuuuagcaagg

SEQ ID NO: 7071 - RNA, 24 nt, Artificial Sequence
  Sythetic
ggaauuccauccacuuuagcaagg

SEQ ID NO: 7072 - RNA, 18 nt, Artificial Sequence
  Sythetic
agccccucuccgagcggg

SEQ ID NO: 7073 - RNA, 19 nt, Artificial Sequence
  Sythetic
cagccccucuccgagcggg

SEQ ID NO: 7074 - RNA, 20 nt, Artificial Sequence
  Sythetic
gcagccccucuccgagcggg

SEQ ID NO: 7075 - RNA, 21 nt, Artificial Sequence
  Sythetic
cgcagccccucuccgagcggg

SEQ ID NO: 7076 - RNA, 22 nt, Artificial Sequence
  Sythetic
gcgcagccccucuccgagcggg

SEQ ID NO: 7077 - RNA, 23 nt, Artificial Sequence
  Sythetic
agcgcagccccucuccgagcggg

SEQ ID NO: 7078 - RNA, 24 nt, Artificial Sequence
  Sythetic
gagcgcagccccucuccgagcggg

SEQ ID NO: 7079 - RNA, 18 nt, Artificial Sequence
  Sythetic
agugcggguggguggggg

SEQ ID NO: 7080 - RNA, 19 nt, Artificial Sequence
  Sythetic
uagugcggguggguggggg

SEQ ID NO: 7081 - RNA, 20 nt, Artificial Sequence
  Sythetic
auagugcggguggguggggg

SEQ ID NO: 7082 - RNA, 21 nt, Artificial Sequence
  Sythetic
uauagugcggguggguggggg

SEQ ID NO: 7083 - RNA, 22 nt, Artificial Sequence
  Sythetic
auauagugcggguggguggggg

SEQ ID NO: 7084 - RNA, 23 nt, Artificial Sequence
  Sythetic
uauauagugcggguggguggggg

SEQ ID NO: 7085 - RNA, 24 nt, Artificial Sequence
  Sythetic
cuauauagugcggguggguggggg

SEQ ID NO: 7086 - RNA, 18 nt, Artificial Sequence
  Sythetic
uagugcgggugggugggg

SEQ ID NO: 7087 - RNA, 19 nt, Artificial Sequence
  Sythetic
auagugcgggugggugggg

SEQ ID NO: 7088 - RNA, 20 nt, Artificial Sequence
  Sythetic
uauagugcgggugggugggg

SEQ ID NO: 7089 - RNA, 21 nt, Artificial Sequence
  Sythetic
auauagugcgggugggugggg

SEQ ID NO: 7090 - RNA, 22 nt, Artificial Sequence
  Sythetic
uauauagugcgggugggugggg

SEQ ID NO: 7091 - RNA, 23 nt, Artificial Sequence
  Sythetic
cuauauagugcgggugggugggg

SEQ ID NO: 7092 - RNA, 24 nt, Artificial Sequence
  Sythetic
ccuauauagugcgggugggugggg

SEQ ID NO: 7093 - RNA, 18 nt, Artificial Sequence
  Sythetic
cuauauagugcggguggg

SEQ ID NO: 7094 - RNA, 19 nt, Artificial Sequence
  Sythetic
ccuauauagugcggguggg

SEQ ID NO: 7095 - RNA, 20 nt, Artificial Sequence
  Sythetic
gccuauauagugcggguggg

SEQ ID NO: 7096 - RNA, 21 nt, Artificial Sequence
  Sythetic
ugccuauauagugcggguggg

SEQ ID NO: 7097 - RNA, 22 nt, Artificial Sequence
  Sythetic
augccuauauagugcggguggg

SEQ ID NO: 7098 - RNA, 23 nt, Artificial Sequence
  Sythetic
caugccuauauagugcggguggg

SEQ ID NO: 7099 - RNA, 24 nt, Artificial Sequence
  Sythetic
ccaugccuauauagugcggguggg

SEQ ID NO: 7100 - RNA, 18 nt, Artificial Sequence
  Sythetic
auagugcggguggguggg

SEQ ID NO: 7101 - RNA, 19 nt, Artificial Sequence
  Sythetic
uauagugcggguggguggg

SEQ ID NO: 7102 - RNA, 20 nt, Artificial Sequence
  Sythetic
auauagugcggguggguggg

SEQ ID NO: 7103 - RNA, 21 nt, Artificial Sequence
  Sythetic
uauauagugcggguggguggg

SEQ ID NO: 7104 - RNA, 22 nt, Artificial Sequence
  Sythetic
cuauauagugcggguggguggg

SEQ ID NO: 7105 - RNA, 23 nt, Artificial Sequence
  Sythetic
ccuauauagugcggguggguggg

SEQ ID NO: 7106 - RNA, 24 nt, Artificial Sequence
  Sythetic
gccuauauagugcggguggguggg

SEQ ID NO: 7107 - RNA, 18 nt, Artificial Sequence
  Sythetic
aaccagcgguuaccaugg

SEQ ID NO: 7108 - RNA, 19 nt, Artificial Sequence
  Sythetic
gaaccagcgguuaccaugg

SEQ ID NO: 7109 - RNA, 20 nt, Artificial Sequence
  Sythetic
agaaccagcgguuaccaugg

SEQ ID NO: 7110 - RNA, 21 nt, Artificial Sequence
  Sythetic
gagaaccagcgguuaccaugg

SEQ ID NO: 7111 - RNA, 22 nt, Artificial Sequence
  Sythetic
ggagaaccagcgguuaccaugg

SEQ ID NO: 7112 - RNA, 23 nt, Artificial Sequence
  Sythetic
uggagaaccagcgguuaccaugg

SEQ ID NO: 7113 - RNA, 24 nt, Artificial Sequence
  Sythetic
cuggagaaccagcgguuaccaugg

SEQ ID NO: 7114 - RNA, 18 nt, Artificial Sequence
  Sythetic
ccuauauagugcgggugg

SEQ ID NO: 7115 - RNA, 19 nt, Artificial Sequence
  Sythetic
gccuauauagugcgggugg

SEQ ID NO: 7116 - RNA, 20 nt, Artificial Sequence
  Sythetic
ugccuauauagugcgggugg

SEQ ID NO: 7117 - RNA, 21 nt, Artificial Sequence
  Sythetic
augccuauauagugcgggugg

SEQ ID NO: 7118 - RNA, 22 nt, Artificial Sequence
  Sythetic
caugccuauauagugcgggugg

SEQ ID NO: 7119 - RNA, 23 nt, Artificial Sequence
  Sythetic
ccaugccuauauagugcgggugg

SEQ ID NO: 7120 - RNA, 24 nt, Artificial Sequence
  Sythetic
accaugccuauauagugcgggugg

SEQ ID NO: 7121 - RNA, 18 nt, Artificial Sequence
  Sythetic
uauagugcgggugggugg

SEQ ID NO: 7122 - RNA, 19 nt, Artificial Sequence
  Sythetic
auauagugcgggugggugg

SEQ ID NO: 7123 - RNA, 20 nt, Artificial Sequence
  Sythetic
uauauagugcgggugggugg

SEQ ID NO: 7124 - RNA, 21 nt, Artificial Sequence
  Sythetic
cuauauagugcgggugggugg

SEQ ID NO: 7125 - RNA, 22 nt, Artificial Sequence
  Sythetic
ccuauauagugcgggugggugg

SEQ ID NO: 7126 - RNA, 23 nt, Artificial Sequence
  Sythetic
gccuauauagugcgggugggugg

SEQ ID NO: 7127 - RNA, 24 nt, Artificial Sequence
  Sythetic
ugccuauauagugcgggugggugg

SEQ ID NO: 7128 - RNA, 18 nt, Artificial Sequence
  Sythetic
gaaccagcgguuaccaug

SEQ ID NO: 7129 - RNA, 19 nt, Artificial Sequence
  Sythetic
agaaccagcgguuaccaug

SEQ ID NO: 7130 - RNA, 20 nt, Artificial Sequence
  Sythetic
gagaaccagcgguuaccaug

SEQ ID NO: 7131 - RNA, 21 nt, Artificial Sequence
  Sythetic
ggagaaccagcgguuaccaug

SEQ ID NO: 7132 - RNA, 22 nt, Artificial Sequence
  Sythetic
uggagaaccagcgguuaccaug

SEQ ID NO: 7133 - RNA, 23 nt, Artificial Sequence
  Sythetic
cuggagaaccagcgguuaccaug

SEQ ID NO: 7134 - RNA, 24 nt, Artificial Sequence
  Sythetic
ucuggagaaccagcgguuaccaug

SEQ ID NO: 7135 - RNA, 18 nt, Artificial Sequence
  Sythetic
caguagccaccgcaucug

SEQ ID NO: 7136 - RNA, 19 nt, Artificial Sequence
  Sythetic
ccaguagccaccgcaucug

SEQ ID NO: 7137 - RNA, 20 nt, Artificial Sequence
  Sythetic
uccaguagccaccgcaucug

SEQ ID NO: 7138 - RNA, 21 nt, Artificial Sequence
  Sythetic
cuccaguagccaccgcaucug

SEQ ID NO: 7139 - RNA, 22 nt, Artificial Sequence
  Sythetic
gcuccaguagccaccgcaucug

SEQ ID NO: 7140 - RNA, 23 nt, Artificial Sequence
  Sythetic
ugcuccaguagccaccgcaucug

SEQ ID NO: 7141 - RNA, 24 nt, Artificial Sequence
  Sythetic
gugcuccaguagccaccgcaucug

SEQ ID NO: 7142 - RNA, 18 nt, Artificial Sequence
  Sythetic
cugaaugggcugcgucug

SEQ ID NO: 7143 - RNA, 19 nt, Artificial Sequence
  Sythetic
ccugaaugggcugcgucug

SEQ ID NO: 7144 - RNA, 20 nt, Artificial Sequence
  Sythetic
uccugaaugggcugcgucug

SEQ ID NO: 7145 - RNA, 21 nt, Artificial Sequence
  Sythetic
cuccugaaugggcugcgucug

SEQ ID NO: 7146 - RNA, 22 nt, Artificial Sequence
  Sythetic
ccuccugaaugggcugcgucug

SEQ ID NO: 7147 - RNA, 23 nt, Artificial Sequence
  Sythetic
accuccugaaugggcugcgucug

SEQ ID NO: 7148 - RNA, 24 nt, Artificial Sequence
  Sythetic
uaccuccugaaugggcugcgucug

SEQ ID NO: 7149 - RNA, 18 nt, Artificial Sequence
  Sythetic
acauucugugcacaagug

SEQ ID NO: 7150 - RNA, 19 nt, Artificial Sequence
  Sythetic
aacauucugugcacaagug

SEQ ID NO: 7151 - RNA, 20 nt, Artificial Sequence
  Sythetic
gaacauucugugcacaagug

SEQ ID NO: 7152 - RNA, 21 nt, Artificial Sequence
  Sythetic
agaacauucugugcacaagug

SEQ ID NO: 7153 - RNA, 22 nt, Artificial Sequence
  Sythetic
aagaacauucugugcacaagug

SEQ ID NO: 7154 - RNA, 23 nt, Artificial Sequence
  Sythetic
uaagaacauucugugcacaagug

SEQ ID NO: 7155 - RNA, 24 nt, Artificial Sequence
  Sythetic
guaagaacauucugugcacaagug

SEQ ID NO: 7156 - RNA, 18 nt, Artificial Sequence
  Sythetic
auauagugcgggugggug

SEQ ID NO: 7157 - RNA, 19 nt, Artificial Sequence
  Sythetic
uauauagugcgggugggug

SEQ ID NO: 7158 - RNA, 20 nt, Artificial Sequence
  Sythetic
cuauauagugcgggugggug

SEQ ID NO: 7159 - RNA, 21 nt, Artificial Sequence
  Sythetic
ccuauauagugcgggugggug

SEQ ID NO: 7160 - RNA, 22 nt, Artificial Sequence
  Sythetic
gccuauauagugcgggugggug

SEQ ID NO: 7161 - RNA, 23 nt, Artificial Sequence
  Sythetic
ugccuauauagugcgggugggug

SEQ ID NO: 7162 - RNA, 24 nt, Artificial Sequence
  Sythetic
augccuauauagugcgggugggug

SEQ ID NO: 7163 - RNA, 18 nt, Artificial Sequence
  Sythetic
cagaagcggccaggacau

SEQ ID NO: 7164 - RNA, 19 nt, Artificial Sequence
  Sythetic
gcagaagcggccaggacau

SEQ ID NO: 7165 - RNA, 20 nt, Artificial Sequence
  Sythetic
ggcagaagcggccaggacau

SEQ ID NO: 7166 - RNA, 21 nt, Artificial Sequence
  Sythetic
gggcagaagcggccaggacau

SEQ ID NO: 7167 - RNA, 22 nt, Artificial Sequence
  Sythetic
cgggcagaagcggccaggacau

SEQ ID NO: 7168 - RNA, 23 nt, Artificial Sequence
  Sythetic
gcgggcagaagcggccaggacau

SEQ ID NO: 7169 - RNA, 24 nt, Artificial Sequence
  Sythetic
agcgggcagaagcggccaggacau

SEQ ID NO: 7170 - RNA, 18 nt, Artificial Sequence
  Sythetic
cuccaguagccaccgcau

SEQ ID NO: 7171 - RNA, 19 nt, Artificial Sequence
  Sythetic
gcuccaguagccaccgcau

SEQ ID NO: 7172 - RNA, 20 nt, Artificial Sequence
  Sythetic
ugcuccaguagccaccgcau

SEQ ID NO: 7173 - RNA, 21 nt, Artificial Sequence
  Sythetic
gugcuccaguagccaccgcau

SEQ ID NO: 7174 - RNA, 22 nt, Artificial Sequence
  Sythetic
agugcuccaguagccaccgcau

SEQ ID NO: 7175 - RNA, 23 nt, Artificial Sequence
  Sythetic
gagugcuccaguagccaccgcau

SEQ ID NO: 7176 - RNA, 24 nt, Artificial Sequence
  Sythetic
ugagugcuccaguagccaccgcau

SEQ ID NO: 7177 - RNA, 18 nt, Artificial Sequence
  Sythetic
ucccgcuucccucaaacu

SEQ ID NO: 7178 - RNA, 19 nt, Artificial Sequence
  Sythetic
aucccgcuucccucaaacu

SEQ ID NO: 7179 - RNA, 20 nt, Artificial Sequence
  Sythetic
caucccgcuucccucaaacu

SEQ ID NO: 7180 - RNA, 21 nt, Artificial Sequence
  Sythetic
gcaucccgcuucccucaaacu

SEQ ID NO: 7181 - RNA, 22 nt, Artificial Sequence
  Sythetic
cgcaucccgcuucccucaaacu

SEQ ID NO: 7182 - RNA, 23 nt, Artificial Sequence
  Sythetic
gcgcaucccgcuucccucaaacu

SEQ ID NO: 7183 - RNA, 24 nt, Artificial Sequence
  Sythetic
ggcgcaucccgcuucccucaaacu

SEQ ID NO: 7184 - RNA, 18 nt, Artificial Sequence
  Sythetic
uguacaaacguuugaacu

SEQ ID NO: 7185 - RNA, 19 nt, Artificial Sequence
  Sythetic
auguacaaacguuugaacu

SEQ ID NO: 7186 - RNA, 20 nt, Artificial Sequence
  Sythetic
aauguacaaacguuugaacu

SEQ ID NO: 7187 - RNA, 21 nt, Artificial Sequence
  Sythetic
aaauguacaaacguuugaacu

SEQ ID NO: 7188 - RNA, 22 nt, Artificial Sequence
  Sythetic
uaaauguacaaacguuugaacu

SEQ ID NO: 7189 - RNA, 23 nt, Artificial Sequence
  Sythetic
auaaauguacaaacguuugaacu

SEQ ID NO: 7190 - RNA, 24 nt, Artificial Sequence
  Sythetic
cauaaauguacaaacguuugaacu

SEQ ID NO: 7191 - RNA, 18 nt, Artificial Sequence
  Sythetic
caaacuuaggaaaugccu

SEQ ID NO: 7192 - RNA, 19 nt, Artificial Sequence
  Sythetic
ucaaacuuaggaaaugccu

SEQ ID NO: 7193 - RNA, 20 nt, Artificial Sequence
  Sythetic
cucaaacuuaggaaaugccu

SEQ ID NO: 7194 - RNA, 21 nt, Artificial Sequence
  Sythetic
ccucaaacuuaggaaaugccu

SEQ ID NO: 7195 - RNA, 22 nt, Artificial Sequence
  Sythetic
cccucaaacuuaggaaaugccu

SEQ ID NO: 7196 - RNA, 23 nt, Artificial Sequence
  Sythetic
ucccucaaacuuaggaaaugccu

SEQ ID NO: 7197 - RNA, 24 nt, Artificial Sequence
  Sythetic
uucccucaaacuuaggaaaugccu

SEQ ID NO: 7198 - RNA, 18 nt, Artificial Sequence
  Sythetic
aaggcgugcgcgcugccu

SEQ ID NO: 7199 - RNA, 19 nt, Artificial Sequence
  Sythetic
gaaggcgugcgcgcugccu

SEQ ID NO: 7200 - RNA, 20 nt, Artificial Sequence
  Sythetic
agaaggcgugcgcgcugccu

SEQ ID NO: 7201 - RNA, 21 nt, Artificial Sequence
  Sythetic
gagaaggcgugcgcgcugccu

SEQ ID NO: 7202 - RNA, 22 nt, Artificial Sequence
  Sythetic
agagaaggcgugcgcgcugccu

SEQ ID NO: 7203 - RNA, 23 nt, Artificial Sequence
  Sythetic
cagagaaggcgugcgcgcugccu

SEQ ID NO: 7204 - RNA, 24 nt, Artificial Sequence
  Sythetic
gcagagaaggcgugcgcgcugccu

SEQ ID NO: 7205 - RNA, 18 nt, Artificial Sequence
  Sythetic
gaccaccggucucuuccu

SEQ ID NO: 7206 - RNA, 19 nt, Artificial Sequence
  Sythetic
agaccaccggucucuuccu

SEQ ID NO: 7207 - RNA, 20 nt, Artificial Sequence
  Sythetic
cagaccaccggucucuuccu

SEQ ID NO: 7208 - RNA, 21 nt, Artificial Sequence
  Sythetic
ucagaccaccggucucuuccu

SEQ ID NO: 7209 - RNA, 22 nt, Artificial Sequence
  Sythetic
cucagaccaccggucucuuccu

SEQ ID NO: 7210 - RNA, 23 nt, Artificial Sequence
  Sythetic
acucagaccaccggucucuuccu

SEQ ID NO: 7211 - RNA, 24 nt, Artificial Sequence
  Sythetic
gacucagaccaccggucucuuccu

SEQ ID NO: 7212 - RNA, 18 nt, Artificial Sequence
  Sythetic
cggcgcaugcgccgcgcu

SEQ ID NO: 7213 - RNA, 19 nt, Artificial Sequence
  Sythetic
gcggcgcaugcgccgcgcu

SEQ ID NO: 7214 - RNA, 20 nt, Artificial Sequence
  Sythetic
agcggcgcaugcgccgcgcu

SEQ ID NO: 7215 - RNA, 21 nt, Artificial Sequence
  Sythetic
cagcggcgcaugcgccgcgcu

SEQ ID NO: 7216 - RNA, 22 nt, Artificial Sequence
  Sythetic
ccagcggcgcaugcgccgcgcu

SEQ ID NO: 7217 - RNA, 23 nt, Artificial Sequence
  Sythetic
cccagcggcgcaugcgccgcgcu

SEQ ID NO: 7218 - RNA, 24 nt, Artificial Sequence
  Sythetic
ccccagcggcgcaugcgccgcgcu

SEQ ID NO: 7219 - RNA, 18 nt, Artificial Sequence
  Sythetic
gggagguccuguccggcu

SEQ ID NO: 7220 - RNA, 19 nt, Artificial Sequence
  Sythetic
ugggagguccuguccggcu

SEQ ID NO: 7221 - RNA, 20 nt, Artificial Sequence
  Sythetic
cugggagguccuguccggcu

SEQ ID NO: 7222 - RNA, 21 nt, Artificial Sequence
  Sythetic
ucugggagguccuguccggcu

SEQ ID NO: 7223 - RNA, 22 nt, Artificial Sequence
  Sythetic
cucugggagguccuguccggcu

SEQ ID NO: 7224 - RNA, 23 nt, Artificial Sequence
  Sythetic
ccucugggagguccuguccggcu

SEQ ID NO: 7225 - RNA, 24 nt, Artificial Sequence
  Sythetic
gccucugggagguccuguccggcu

SEQ ID NO: 7226 - RNA, 18 nt, Artificial Sequence
  Sythetic
uuagagcgcagccccucu

SEQ ID NO: 7227 - RNA, 19 nt, Artificial Sequence
  Sythetic
cuuagagcgcagccccucu

SEQ ID NO: 7228 - RNA, 20 nt, Artificial Sequence
  Sythetic
acuuagagcgcagccccucu

SEQ ID NO: 7229 - RNA, 21 nt, Artificial Sequence
  Sythetic
aacuuagagcgcagccccucu

SEQ ID NO: 7230 - RNA, 22 nt, Artificial Sequence
  Sythetic
gaacuuagagcgcagccccucu

SEQ ID NO: 7231 - RNA, 23 nt, Artificial Sequence
  Sythetic
ugaacuuagagcgcagccccucu

SEQ ID NO: 7232 - RNA, 24 nt, Artificial Sequence
  Sythetic
uugaacuuagagcgcagccccucu

SEQ ID NO: 7233 - RNA, 18 nt, Artificial Sequence
  Sythetic
aacuuaggaaaugccucu

SEQ ID NO: 7234 - RNA, 19 nt, Artificial Sequence
  Sythetic
aaacuuaggaaaugccucu

SEQ ID NO: 7235 - RNA, 20 nt, Artificial Sequence
  Sythetic
caaacuuaggaaaugccucu

SEQ ID NO: 7236 - RNA, 21 nt, Artificial Sequence
  Sythetic
ucaaacuuaggaaaugccucu

SEQ ID NO: 7237 - RNA, 22 nt, Artificial Sequence
  Sythetic
cucaaacuuaggaaaugccucu

SEQ ID NO: 7238 - RNA, 23 nt, Artificial Sequence
  Sythetic
ccucaaacuuaggaaaugccucu

SEQ ID NO: 7239 - RNA, 24 nt, Artificial Sequence
  Sythetic
cccucaaacuuaggaaaugccucu

SEQ ID NO: 7240 - RNA, 18 nt, Artificial Sequence
  Sythetic
ucauaaauguacaaacgu

SEQ ID NO: 7241 - RNA, 19 nt, Artificial Sequence
  Sythetic
gucauaaauguacaaacgu

SEQ ID NO: 7242 - RNA, 20 nt, Artificial Sequence
  Sythetic
ugucauaaauguacaaacgu

SEQ ID NO: 7243 - RNA, 21 nt, Artificial Sequence
  Sythetic
uugucauaaauguacaaacgu

SEQ ID NO: 7244 - RNA, 22 nt, Artificial Sequence
  Sythetic
uuugucauaaauguacaaacgu

SEQ ID NO: 7245 - RNA, 23 nt, Artificial Sequence
  Sythetic
cuuugucauaaauguacaaacgu

SEQ ID NO: 7246 - RNA, 24 nt, Artificial Sequence
  Sythetic
gcuuugucauaaauguacaaacgu

SEQ ID NO: 7247 - RNA, 18 nt, Artificial Sequence
  Sythetic
cacgcuguuugcaaacgu

SEQ ID NO: 7248 - RNA, 19 nt, Artificial Sequence
  Sythetic
gcacgcuguuugcaaacgu

SEQ ID NO: 7249 - RNA, 20 nt, Artificial Sequence
  Sythetic
ugcacgcuguuugcaaacgu

SEQ ID NO: 7250 - RNA, 21 nt, Artificial Sequence
  Sythetic
uugcacgcuguuugcaaacgu

SEQ ID NO: 7251 - RNA, 22 nt, Artificial Sequence
  Sythetic
cuugcacgcuguuugcaaacgu

SEQ ID NO: 7252 - RNA, 23 nt, Artificial Sequence
  Sythetic
gcuugcacgcuguuugcaaacgu

SEQ ID NO: 7253 - RNA, 24 nt, Artificial Sequence
  Sythetic
ggcuugcacgcuguuugcaaacgu

SEQ ID NO: 7254 - RNA, 18 nt, Artificial Sequence
  Sythetic
aagcgcggggaauggcgu

SEQ ID NO: 7255 - RNA, 19 nt, Artificial Sequence
  Sythetic
aaagcgcggggaauggcgu

SEQ ID NO: 7256 - RNA, 20 nt, Artificial Sequence
  Sythetic
gaaagcgcggggaauggcgu

SEQ ID NO: 7257 - RNA, 21 nt, Artificial Sequence
  Sythetic
ugaaagcgcggggaauggcgu

SEQ ID NO: 7258 - RNA, 22 nt, Artificial Sequence
  Sythetic
cugaaagcgcggggaauggcgu

SEQ ID NO: 7259 - RNA, 23 nt, Artificial Sequence
  Sythetic
gcugaaagcgcggggaauggcgu

SEQ ID NO: 7260 - RNA, 24 nt, Artificial Sequence
  Sythetic
ugcugaaagcgcggggaauggcgu

SEQ ID NO: 7261 - RNA, 18 nt, Artificial Sequence
  Sythetic
acuguagcauucccaggu

SEQ ID NO: 7262 - RNA, 19 nt, Artificial Sequence
  Sythetic
uacuguagcauucccaggu

SEQ ID NO: 7263 - RNA, 20 nt, Artificial Sequence
  Sythetic
cuacuguagcauucccaggu

SEQ ID NO: 7264 - RNA, 21 nt, Artificial Sequence
  Sythetic
ucuacuguagcauucccaggu

SEQ ID NO: 7265 - RNA, 22 nt, Artificial Sequence
  Sythetic
cucuacuguagcauucccaggu

SEQ ID NO: 7266 - RNA, 23 nt, Artificial Sequence
  Sythetic
ucucuacuguagcauucccaggu

SEQ ID NO: 7267 - RNA, 24 nt, Artificial Sequence
  Sythetic
gucucuacuguagcauucccaggu

SEQ ID NO: 7268 - RNA, 18 nt, Artificial Sequence
  Sythetic
uauauagugcgggugggu

SEQ ID NO: 7269 - RNA, 19 nt, Artificial Sequence
  Sythetic
cuauauagugcgggugggu

SEQ ID NO: 7270 - RNA, 20 nt, Artificial Sequence
  Sythetic
ccuauauagugcgggugggu

SEQ ID NO: 7271 - RNA, 21 nt, Artificial Sequence
  Sythetic
gccuauauagugcgggugggu

SEQ ID NO: 7272 - RNA, 22 nt, Artificial Sequence
  Sythetic
ugccuauauagugcgggugggu

SEQ ID NO: 7273 - RNA, 23 nt, Artificial Sequence
  Sythetic
augccuauauagugcgggugggu

SEQ ID NO: 7274 - RNA, 24 nt, Artificial Sequence
  Sythetic
caugccuauauagugcgggugggu

SEQ ID NO: 7275 - RNA, 18 nt, Artificial Sequence
  Sythetic
cccgcuucccucaaacuu

SEQ ID NO: 7276 - RNA, 19 nt, Artificial Sequence
  Sythetic
ucccgcuucccucaaacuu

SEQ ID NO: 7277 - RNA, 20 nt, Artificial Sequence
  Sythetic
aucccgcuucccucaaacuu

SEQ ID NO: 7278 - RNA, 21 nt, Artificial Sequence
  Sythetic
caucccgcuucccucaaacuu

SEQ ID NO: 7279 - RNA, 22 nt, Artificial Sequence
  Sythetic
gcaucccgcuucccucaaacuu

SEQ ID NO: 7280 - RNA, 23 nt, Artificial Sequence
  Sythetic
cgcaucccgcuucccucaaacuu

SEQ ID NO: 7281 - RNA, 24 nt, Artificial Sequence
  Sythetic
gcgcaucccgcuucccucaaacuu

SEQ ID NO: 7282 - RNA, 18 nt, Artificial Sequence
  Sythetic
accaccggucucuuccuu

SEQ ID NO: 7283 - RNA, 19 nt, Artificial Sequence
  Sythetic
gaccaccggucucuuccuu

SEQ ID NO: 7284 - RNA, 20 nt, Artificial Sequence
  Sythetic
agaccaccggucucuuccuu

SEQ ID NO: 7285 - RNA, 21 nt, Artificial Sequence
  Sythetic
cagaccaccggucucuuccuu

SEQ ID NO: 7286 - RNA, 22 nt, Artificial Sequence
  Sythetic
ucagaccaccggucucuuccuu

SEQ ID NO: 7287 - RNA, 23 nt, Artificial Sequence
  Sythetic
cucagaccaccggucucuuccuu

SEQ ID NO: 7288 - RNA, 24 nt, Artificial Sequence
  Sythetic
acucagaccaccggucucuuccuu

SEQ ID NO: 7289 - RNA, 18 nt, Artificial Sequence
  Sythetic
acagcuccgucggccgca

SEQ ID NO: 7290 - RNA, 19 nt, Artificial Sequence
  Sythetic
cacagcuccgucggccgca

SEQ ID NO: 7291 - RNA, 20 nt, Artificial Sequence
  Sythetic
gcacagcuccgucggccgca

SEQ ID NO: 7292 - RNA, 21 nt, Artificial Sequence
  Sythetic
ggcacagcuccgucggccgca

SEQ ID NO: 7293 - RNA, 22 nt, Artificial Sequence
  Sythetic
uggcacagcuccgucggccgca

SEQ ID NO: 7294 - RNA, 23 nt, Artificial Sequence
  Sythetic
cuggcacagcuccgucggccgca

SEQ ID NO: 7295 - RNA, 24 nt, Artificial Sequence
  Sythetic
acuggcacagcuccgucggccgca

SEQ ID NO: 7296 - RNA, 18 nt, Artificial Sequence
  Sythetic
caccacucgauccccuca

SEQ ID NO: 7297 - RNA, 19 nt, Artificial Sequence
  Sythetic
ccaccacucgauccccuca

SEQ ID NO: 7298 - RNA, 20 nt, Artificial Sequence
  Sythetic
gccaccacucgauccccuca

SEQ ID NO: 7299 - RNA, 21 nt, Artificial Sequence
  Sythetic
ugccaccacucgauccccuca

SEQ ID NO: 7300 - RNA, 22 nt, Artificial Sequence
  Sythetic
cugccaccacucgauccccuca

SEQ ID NO: 7301 - RNA, 23 nt, Artificial Sequence
  Sythetic
gcugccaccacucgauccccuca

SEQ ID NO: 7302 - RNA, 24 nt, Artificial Sequence
  Sythetic
ugcugccaccacucgauccccuca

SEQ ID NO: 7303 - RNA, 18 nt, Artificial Sequence
  Sythetic
ccacacgguguugugaga

SEQ ID NO: 7304 - RNA, 19 nt, Artificial Sequence
  Sythetic
cccacacgguguugugaga

SEQ ID NO: 7305 - RNA, 20 nt, Artificial Sequence
  Sythetic
acccacacgguguugugaga

SEQ ID NO: 7306 - RNA, 21 nt, Artificial Sequence
  Sythetic
uacccacacgguguugugaga

SEQ ID NO: 7307 - RNA, 22 nt, Artificial Sequence
  Sythetic
auacccacacgguguugugaga

SEQ ID NO: 7308 - RNA, 23 nt, Artificial Sequence
  Sythetic
aauacccacacgguguugugaga

SEQ ID NO: 7309 - RNA, 24 nt, Artificial Sequence
  Sythetic
uaauacccacacgguguugugaga

SEQ ID NO: 7310 - RNA, 18 nt, Artificial Sequence
  Sythetic
acgguguugugagaauga

SEQ ID NO: 7311 - RNA, 19 nt, Artificial Sequence
  Sythetic
cacgguguugugagaauga

SEQ ID NO: 7312 - RNA, 20 nt, Artificial Sequence
  Sythetic
acacgguguugugagaauga

SEQ ID NO: 7313 - RNA, 21 nt, Artificial Sequence
  Sythetic
cacacgguguugugagaauga

SEQ ID NO: 7314 - RNA, 22 nt, Artificial Sequence
  Sythetic
ccacacgguguugugagaauga

SEQ ID NO: 7315 - RNA, 23 nt, Artificial Sequence
  Sythetic
cccacacgguguugugagaauga

SEQ ID NO: 7316 - RNA, 24 nt, Artificial Sequence
  Sythetic
acccacacgguguugugagaauga

SEQ ID NO: 7317 - RNA, 18 nt, Artificial Sequence
  Sythetic
aguauggggaccgaagac

SEQ ID NO: 7318 - RNA, 19 nt, Artificial Sequence
  Sythetic
gaguauggggaccgaagac

SEQ ID NO: 7319 - RNA, 20 nt, Artificial Sequence
  Sythetic
cgaguauggggaccgaagac

SEQ ID NO: 7320 - RNA, 21 nt, Artificial Sequence
  Sythetic
ccgaguauggggaccgaagac

SEQ ID NO: 7321 - RNA, 22 nt, Artificial Sequence
  Sythetic
gccgaguauggggaccgaagac

SEQ ID NO: 7322 - RNA, 23 nt, Artificial Sequence
  Sythetic
cgccgaguauggggaccgaagac

SEQ ID NO: 7323 - RNA, 24 nt, Artificial Sequence
  Sythetic
acgccgaguauggggaccgaagac

SEQ ID NO: 7324 - RNA, 18 nt, Artificial Sequence
  Sythetic
cuacaucugaucagucuc

SEQ ID NO: 7325 - RNA, 19 nt, Artificial Sequence
  Sythetic
ucuacaucugaucagucuc

SEQ ID NO: 7326 - RNA, 20 nt, Artificial Sequence
  Sythetic
aucuacaucugaucagucuc

SEQ ID NO: 7327 - RNA, 21 nt, Artificial Sequence
  Sythetic
uaucuacaucugaucagucuc

SEQ ID NO: 7328 - RNA, 22 nt, Artificial Sequence
  Sythetic
auaucuacaucugaucagucuc

SEQ ID NO: 7329 - RNA, 23 nt, Artificial Sequence
  Sythetic
cauaucuacaucugaucagucuc

SEQ ID NO: 7330 - RNA, 24 nt, Artificial Sequence
  Sythetic
acauaucuacaucugaucagucuc

SEQ ID NO: 7331 - RNA, 18 nt, Artificial Sequence
  Sythetic
gauaauaaagcacuauuc

SEQ ID NO: 7332 - RNA, 19 nt, Artificial Sequence
  Sythetic
ggauaauaaagcacuauuc

SEQ ID NO: 7333 - RNA, 20 nt, Artificial Sequence
  Sythetic
aggauaauaaagcacuauuc

SEQ ID NO: 7334 - RNA, 21 nt, Artificial Sequence
  Sythetic
uaggauaauaaagcacuauuc

SEQ ID NO: 7335 - RNA, 22 nt, Artificial Sequence
  Sythetic
uuaggauaauaaagcacuauuc

SEQ ID NO: 7336 - RNA, 23 nt, Artificial Sequence
  Sythetic
uuuaggauaauaaagcacuauuc

SEQ ID NO: 7337 - RNA, 24 nt, Artificial Sequence
  Sythetic
uuuuaggauaauaaagcacuauuc

SEQ ID NO: 7338 - RNA, 18 nt, Artificial Sequence
  Sythetic
ggccuugucugguucacg

SEQ ID NO: 7339 - RNA, 19 nt, Artificial Sequence
  Sythetic
gggccuugucugguucacg

SEQ ID NO: 7340 - RNA, 20 nt, Artificial Sequence
  Sythetic
cgggccuugucugguucacg

SEQ ID NO: 7341 - RNA, 21 nt, Artificial Sequence
  Sythetic
gcgggccuugucugguucacg

SEQ ID NO: 7342 - RNA, 22 nt, Artificial Sequence
  Sythetic
ugcgggccuugucugguucacg

SEQ ID NO: 7343 - RNA, 23 nt, Artificial Sequence
  Sythetic
augcgggccuugucugguucacg

SEQ ID NO: 7344 - RNA, 24 nt, Artificial Sequence
  Sythetic
aaugcgggccuugucugguucacg

SEQ ID NO: 7345 - RNA, 18 nt, Artificial Sequence
  Sythetic
ccucagaggaucggcgcg

SEQ ID NO: 7346 - RNA, 19 nt, Artificial Sequence
  Sythetic
cccucagaggaucggcgcg

SEQ ID NO: 7347 - RNA, 20 nt, Artificial Sequence
  Sythetic
ccccucagaggaucggcgcg

SEQ ID NO: 7348 - RNA, 21 nt, Artificial Sequence
  Sythetic
uccccucagaggaucggcgcg

SEQ ID NO: 7349 - RNA, 22 nt, Artificial Sequence
  Sythetic
auccccucagaggaucggcgcg

SEQ ID NO: 7350 - RNA, 23 nt, Artificial Sequence
  Sythetic
gauccccucagaggaucggcgcg

SEQ ID NO: 7351 - RNA, 24 nt, Artificial Sequence
  Sythetic
cgauccccucagaggaucggcgcg

SEQ ID NO: 7352 - RNA, 18 nt, Artificial Sequence
  Sythetic
caaacccaaagcgcgcgg

SEQ ID NO: 7353 - RNA, 19 nt, Artificial Sequence
  Sythetic
ucaaacccaaagcgcgcgg

SEQ ID NO: 7354 - RNA, 20 nt, Artificial Sequence
  Sythetic
cucaaacccaaagcgcgcgg

SEQ ID NO: 7355 - RNA, 21 nt, Artificial Sequence
  Sythetic
ccucaaacccaaagcgcgcgg

SEQ ID NO: 7356 - RNA, 22 nt, Artificial Sequence
  Sythetic
cccucaaacccaaagcgcgcgg

SEQ ID NO: 7357 - RNA, 23 nt, Artificial Sequence
  Sythetic
ccccucaaacccaaagcgcgcgg

SEQ ID NO: 7358 - RNA, 24 nt, Artificial Sequence
  Sythetic
cccccucaaacccaaagcgcgcgg

SEQ ID NO: 7359 - RNA, 18 nt, Artificial Sequence
  Sythetic
cuggguucaagcccggcu

SEQ ID NO: 7360 - RNA, 19 nt, Artificial Sequence
  Sythetic
ccuggguucaagcccggcu

SEQ ID NO: 7361 - RNA, 20 nt, Artificial Sequence
  Sythetic
accuggguucaagcccggcu

SEQ ID NO: 7362 - RNA, 21 nt, Artificial Sequence
  Sythetic
gaccuggguucaagcccggcu

SEQ ID NO: 7363 - RNA, 22 nt, Artificial Sequence
  Sythetic
agaccuggguucaagcccggcu

SEQ ID NO: 7364 - RNA, 23 nt, Artificial Sequence
  Sythetic
aagaccuggguucaagcccggcu

SEQ ID NO: 7365 - RNA, 24 nt, Artificial Sequence
  Sythetic
gaagaccuggguucaagcccggcu

SEQ ID NO: 7366 - RNA, 18 nt, Artificial Sequence
  Sythetic
ccugacccuagugaugcu

SEQ ID NO: 7367 - RNA, 19 nt, Artificial Sequence
  Sythetic
accugacccuagugaugcu

SEQ ID NO: 7368 - RNA, 20 nt, Artificial Sequence
  Sythetic
caccugacccuagugaugcu

SEQ ID NO: 7369 - RNA, 21 nt, Artificial Sequence
  Sythetic
gcaccugacccuagugaugcu

SEQ ID NO: 7370 - RNA, 22 nt, Artificial Sequence
  Sythetic
ugcaccugacccuagugaugcu

SEQ ID NO: 7371 - RNA, 23 nt, Artificial Sequence
  Sythetic
cugcaccugacccuagugaugcu

SEQ ID NO: 7372 - RNA, 24 nt, Artificial Sequence
  Sythetic
ucugcaccugacccuagugaugcu

SEQ ID NO: 7373 - RNA, 18 nt, Artificial Sequence
  Sythetic
gcuuauuugcugguuucu

SEQ ID NO: 7374 - RNA, 19 nt, Artificial Sequence
  Sythetic
ggcuuauuugcugguuucu

SEQ ID NO: 7375 - RNA, 20 nt, Artificial Sequence
  Sythetic
gggcuuauuugcugguuucu

SEQ ID NO: 7376 - RNA, 21 nt, Artificial Sequence
  Sythetic
cgggcuuauuugcugguuucu

SEQ ID NO: 7377 - RNA, 22 nt, Artificial Sequence
  Sythetic
ccgggcuuauuugcugguuucu

SEQ ID NO: 7378 - RNA, 23 nt, Artificial Sequence
  Sythetic
uccgggcuuauuugcugguuucu

SEQ ID NO: 7379 - RNA, 24 nt, Artificial Sequence
  Sythetic
cuccgggcuuauuugcugguuucu

SEQ ID NO: 7380 - RNA, 18 nt, Artificial Sequence
  Sythetic
auacccacacgguguugu

SEQ ID NO: 7381 - RNA, 19 nt, Artificial Sequence
  Sythetic
aauacccacacgguguugu

SEQ ID NO: 7382 - RNA, 20 nt, Artificial Sequence
  Sythetic
uaauacccacacgguguugu

SEQ ID NO: 7383 - RNA, 21 nt, Artificial Sequence
  Sythetic
guaauacccacacgguguugu

SEQ ID NO: 7384 - RNA, 22 nt, Artificial Sequence
  Sythetic
gguaauacccacacgguguugu

SEQ ID NO: 7385 - RNA, 23 nt, Artificial Sequence
  Sythetic
ugguaauacccacacgguguugu

SEQ ID NO: 7386 - RNA, 24 nt, Artificial Sequence
  Sythetic
augguaauacccacacgguguugu

SEQ ID NO: 7387 - RNA, 18 nt, Artificial Sequence
  Sythetic
uauaauaaagcauacuuu

SEQ ID NO: 7388 - RNA, 19 nt, Artificial Sequence
  Sythetic
uuauaauaaagcauacuuu

SEQ ID NO: 7389 - RNA, 20 nt, Artificial Sequence
  Sythetic
cuuauaauaaagcauacuuu

SEQ ID NO: 7390 - RNA, 21 nt, Artificial Sequence
  Sythetic
ucuuauaauaaagcauacuuu

SEQ ID NO: 7391 - RNA, 22 nt, Artificial Sequence
  Sythetic
cucuuauaauaaagcauacuuu

SEQ ID NO: 7392 - RNA, 23 nt, Artificial Sequence
  Sythetic
acucuuauaauaaagcauacuuu

SEQ ID NO: 7393 - RNA, 24 nt, Artificial Sequence
  Sythetic
uacucuuauaauaaagcauacuuu

SEQ ID NO: 7394 - RNA, 18 nt, Artificial Sequence
  Sythetic
uggugacuguucuugaca

SEQ ID NO: 7395 - RNA, 19 nt, Artificial Sequence
  Sythetic
cuggugacuguucuugaca

SEQ ID NO: 7396 - RNA, 20 nt, Artificial Sequence
  Sythetic
ccuggugacuguucuugaca

SEQ ID NO: 7397 - RNA, 21 nt, Artificial Sequence
  Sythetic
gccuggugacuguucuugaca

SEQ ID NO: 7398 - RNA, 22 nt, Artificial Sequence
  Sythetic
cgccuggugacuguucuugaca

SEQ ID NO: 7399 - RNA, 23 nt, Artificial Sequence
  Sythetic
gcgccuggugacuguucuugaca

SEQ ID NO: 7400 - RNA, 24 nt, Artificial Sequence
  Sythetic
agcgccuggugacuguucuugaca

SEQ ID NO: 7401 - RNA, 18 nt, Artificial Sequence
  Sythetic
gaucacuaggaacuugca

SEQ ID NO: 7402 - RNA, 19 nt, Artificial Sequence
  Sythetic
agaucacuaggaacuugca

SEQ ID NO: 7403 - RNA, 20 nt, Artificial Sequence
  Sythetic
cagaucacuaggaacuugca

SEQ ID NO: 7404 - RNA, 21 nt, Artificial Sequence
  Sythetic
acagaucacuaggaacuugca

SEQ ID NO: 7405 - RNA, 22 nt, Artificial Sequence
  Sythetic
aacagaucacuaggaacuugca

SEQ ID NO: 7406 - RNA, 23 nt, Artificial Sequence
  Sythetic
uaacagaucacuaggaacuugca

SEQ ID NO: 7407 - RNA, 24 nt, Artificial Sequence
  Sythetic
guaacagaucacuaggaacuugca

SEQ ID NO: 7408 - RNA, 18 nt, Artificial Sequence
  Sythetic
ucuuccccacggccgcga

SEQ ID NO: 7409 - RNA, 19 nt, Artificial Sequence
  Sythetic
cucuuccccacggccgcga

SEQ ID NO: 7410 - RNA, 20 nt, Artificial Sequence
  Sythetic
ccucuuccccacggccgcga

SEQ ID NO: 7411 - RNA, 21 nt, Artificial Sequence
  Sythetic
gccucuuccccacggccgcga

SEQ ID NO: 7412 - RNA, 22 nt, Artificial Sequence
  Sythetic
cgccucuuccccacggccgcga

SEQ ID NO: 7413 - RNA, 23 nt, Artificial Sequence
  Sythetic
gcgccucuuccccacggccgcga

SEQ ID NO: 7414 - RNA, 24 nt, Artificial Sequence
  Sythetic
cgcgccucuuccccacggccgcga

SEQ ID NO: 7415 - RNA, 18 nt, Artificial Sequence
  Sythetic
ugcgcuccggggauagga

SEQ ID NO: 7416 - RNA, 19 nt, Artificial Sequence
  Sythetic
uugcgcuccggggauagga

SEQ ID NO: 7417 - RNA, 20 nt, Artificial Sequence
  Sythetic
uuugcgcuccggggauagga

SEQ ID NO: 7418 - RNA, 21 nt, Artificial Sequence
  Sythetic
auuugcgcuccggggauagga

SEQ ID NO: 7419 - RNA, 22 nt, Artificial Sequence
  Sythetic
gauuugcgcuccggggauagga

SEQ ID NO: 7420 - RNA, 23 nt, Artificial Sequence
  Sythetic
agauuugcgcuccggggauagga

SEQ ID NO: 7421 - RNA, 24 nt, Artificial Sequence
  Sythetic
gagauuugcgcuccggggauagga

SEQ ID NO: 7422 - RNA, 18 nt, Artificial Sequence
  Sythetic
gccgauccucugagggga

SEQ ID NO: 7423 - RNA, 19 nt, Artificial Sequence
  Sythetic
cgccgauccucugagggga

SEQ ID NO: 7424 - RNA, 20 nt, Artificial Sequence
  Sythetic
gcgccgauccucugagggga

SEQ ID NO: 7425 - RNA, 21 nt, Artificial Sequence
  Sythetic
cgcgccgauccucugagggga

SEQ ID NO: 7426 - RNA, 22 nt, Artificial Sequence
  Sythetic
ccgcgccgauccucugagggga

SEQ ID NO: 7427 - RNA, 23 nt, Artificial Sequence
  Sythetic
accgcgccgauccucugagggga

SEQ ID NO: 7428 - RNA, 24 nt, Artificial Sequence
  Sythetic
caccgcgccgauccucugagggga

SEQ ID NO: 7429 - RNA, 18 nt, Artificial Sequence
  Sythetic
accgcgccgauccucuga

SEQ ID NO: 7430 - RNA, 19 nt, Artificial Sequence
  Sythetic
caccgcgccgauccucuga

SEQ ID NO: 7431 - RNA, 20 nt, Artificial Sequence
  Sythetic
ccaccgcgccgauccucuga

SEQ ID NO: 7432 - RNA, 21 nt, Artificial Sequence
  Sythetic
cccaccgcgccgauccucuga

SEQ ID NO: 7433 - RNA, 22 nt, Artificial Sequence
  Sythetic
acccaccgcgccgauccucuga

SEQ ID NO: 7434 - RNA, 23 nt, Artificial Sequence
  Sythetic
gacccaccgcgccgauccucuga

SEQ ID NO: 7435 - RNA, 24 nt, Artificial Sequence
  Sythetic
ggacccaccgcgccgauccucuga

SEQ ID NO: 7436 - RNA, 18 nt, Artificial Sequence
  Sythetic
cggggauaggagcgggua

SEQ ID NO: 7437 - RNA, 19 nt, Artificial Sequence
  Sythetic
ccggggauaggagcgggua

SEQ ID NO: 7438 - RNA, 20 nt, Artificial Sequence
  Sythetic
uccggggauaggagcgggua

SEQ ID NO: 7439 - RNA, 21 nt, Artificial Sequence
  Sythetic
cuccggggauaggagcgggua

SEQ ID NO: 7440 - RNA, 22 nt, Artificial Sequence
  Sythetic
gcuccggggauaggagcgggua

SEQ ID NO: 7441 - RNA, 23 nt, Artificial Sequence
  Sythetic
cgcuccggggauaggagcgggua

SEQ ID NO: 7442 - RNA, 24 nt, Artificial Sequence
  Sythetic
gcgcuccggggauaggagcgggua

SEQ ID NO: 7443 - RNA, 18 nt, Artificial Sequence
  Sythetic
gcacauucacagcaucac

SEQ ID NO: 7444 - RNA, 19 nt, Artificial Sequence
  Sythetic
ugcacauucacagcaucac

SEQ ID NO: 7445 - RNA, 20 nt, Artificial Sequence
  Sythetic
uugcacauucacagcaucac

SEQ ID NO: 7446 - RNA, 21 nt, Artificial Sequence
  Sythetic
cuugcacauucacagcaucac

SEQ ID NO: 7447 - RNA, 22 nt, Artificial Sequence
  Sythetic
acuugcacauucacagcaucac

SEQ ID NO: 7448 - RNA, 23 nt, Artificial Sequence
  Sythetic
uacuugcacauucacagcaucac

SEQ ID NO: 7449 - RNA, 24 nt, Artificial Sequence
  Sythetic
auacuugcacauucacagcaucac

SEQ ID NO: 7450 - RNA, 18 nt, Artificial Sequence
  Sythetic
cgccucuuccccacggcc

SEQ ID NO: 7451 - RNA, 19 nt, Artificial Sequence
  Sythetic
gcgccucuuccccacggcc

SEQ ID NO: 7452 - RNA, 20 nt, Artificial Sequence
  Sythetic
cgcgccucuuccccacggcc

SEQ ID NO: 7453 - RNA, 21 nt, Artificial Sequence
  Sythetic
gcgcgccucuuccccacggcc

SEQ ID NO: 7454 - RNA, 22 nt, Artificial Sequence
  Sythetic
agcgcgccucuuccccacggcc

SEQ ID NO: 7455 - RNA, 23 nt, Artificial Sequence
  Sythetic
aagcgcgccucuuccccacggcc

SEQ ID NO: 7456 - RNA, 24 nt, Artificial Sequence
  Sythetic
gaagcgcgccucuuccccacggcc

SEQ ID NO: 7457 - RNA, 18 nt, Artificial Sequence
  Sythetic
ccggagagaugaaaugcc

SEQ ID NO: 7458 - RNA, 19 nt, Artificial Sequence
  Sythetic
cccggagagaugaaaugcc

SEQ ID NO: 7459 - RNA, 20 nt, Artificial Sequence
  Sythetic
gcccggagagaugaaaugcc

SEQ ID NO: 7460 - RNA, 21 nt, Artificial Sequence
  Sythetic
agcccggagagaugaaaugcc

SEQ ID NO: 7461 - RNA, 22 nt, Artificial Sequence
  Sythetic
aagcccggagagaugaaaugcc

SEQ ID NO: 7462 - RNA, 23 nt, Artificial Sequence
  Sythetic
uaagcccggagagaugaaaugcc

SEQ ID NO: 7463 - RNA, 24 nt, Artificial Sequence
  Sythetic
auaagcccggagagaugaaaugcc

SEQ ID NO: 7464 - RNA, 18 nt, Artificial Sequence
  Sythetic
cccugagauuugcgcucc

SEQ ID NO: 7465 - RNA, 19 nt, Artificial Sequence
  Sythetic
gcccugagauuugcgcucc

SEQ ID NO: 7466 - RNA, 20 nt, Artificial Sequence
  Sythetic
agcccugagauuugcgcucc

SEQ ID NO: 7467 - RNA, 21 nt, Artificial Sequence
  Sythetic
cagcccugagauuugcgcucc

SEQ ID NO: 7468 - RNA, 22 nt, Artificial Sequence
  Sythetic
ccagcccugagauuugcgcucc

SEQ ID NO: 7469 - RNA, 23 nt, Artificial Sequence
  Sythetic
gccagcccugagauuugcgcucc

SEQ ID NO: 7470 - RNA, 24 nt, Artificial Sequence
  Sythetic
ugccagcccugagauuugcgcucc

SEQ ID NO: 7471 - RNA, 18 nt, Artificial Sequence
  Sythetic
gaaaugccagggaugggc

SEQ ID NO: 7472 - RNA, 19 nt, Artificial Sequence
  Sythetic
ugaaaugccagggaugggc

SEQ ID NO: 7473 - RNA, 20 nt, Artificial Sequence
  Sythetic
augaaaugccagggaugggc

SEQ ID NO: 7474 - RNA, 21 nt, Artificial Sequence
  Sythetic
gaugaaaugccagggaugggc

SEQ ID NO: 7475 - RNA, 22 nt, Artificial Sequence
  Sythetic
agaugaaaugccagggaugggc

SEQ ID NO: 7476 - RNA, 23 nt, Artificial Sequence
  Sythetic
gagaugaaaugccagggaugggc

SEQ ID NO: 7477 - RNA, 24 nt, Artificial Sequence
  Sythetic
agagaugaaaugccagggaugggc

SEQ ID NO: 7478 - RNA, 18 nt, Artificial Sequence
  Sythetic
aauagcgguaaccaauuc

SEQ ID NO: 7479 - RNA, 19 nt, Artificial Sequence
  Sythetic
uaauagcgguaaccaauuc

SEQ ID NO: 7480 - RNA, 20 nt, Artificial Sequence
  Sythetic
auaauagcgguaaccaauuc

SEQ ID NO: 7481 - RNA, 21 nt, Artificial Sequence
  Sythetic
cauaauagcgguaaccaauuc

SEQ ID NO: 7482 - RNA, 22 nt, Artificial Sequence
  Sythetic
ucauaauagcgguaaccaauuc

SEQ ID NO: 7483 - RNA, 23 nt, Artificial Sequence
  Sythetic
uucauaauagcgguaaccaauuc

SEQ ID NO: 7484 - RNA, 24 nt, Artificial Sequence
  Sythetic
uuucauaauagcgguaaccaauuc

SEQ ID NO: 7485 - RNA, 18 nt, Artificial Sequence
  Sythetic
gaguggguccugcaguuc

SEQ ID NO: 7486 - RNA, 19 nt, Artificial Sequence
  Sythetic
cgaguggguccugcaguuc

SEQ ID NO: 7487 - RNA, 20 nt, Artificial Sequence
  Sythetic
gcgaguggguccugcaguuc

SEQ ID NO: 7488 - RNA, 21 nt, Artificial Sequence
  Sythetic
cgcgaguggguccugcaguuc

SEQ ID NO: 7489 - RNA, 22 nt, Artificial Sequence
  Sythetic
ccgcgaguggguccugcaguuc

SEQ ID NO: 7490 - RNA, 23 nt, Artificial Sequence
  Sythetic
gccgcgaguggguccugcaguuc

SEQ ID NO: 7491 - RNA, 24 nt, Artificial Sequence
  Sythetic
ggccgcgaguggguccugcaguuc

SEQ ID NO: 7492 - RNA, 18 nt, Artificial Sequence
  Sythetic
gggucgugcagaggucag

SEQ ID NO: 7493 - RNA, 19 nt, Artificial Sequence
  Sythetic
ggggucgugcagaggucag

SEQ ID NO: 7494 - RNA, 20 nt, Artificial Sequence
  Sythetic
uggggucgugcagaggucag

SEQ ID NO: 7495 - RNA, 21 nt, Artificial Sequence
  Sythetic
uuggggucgugcagaggucag

SEQ ID NO: 7496 - RNA, 22 nt, Artificial Sequence
  Sythetic
uuuggggucgugcagaggucag

SEQ ID NO: 7497 - RNA, 23 nt, Artificial Sequence
  Sythetic
guuuggggucgugcagaggucag

SEQ ID NO: 7498 - RNA, 24 nt, Artificial Sequence
  Sythetic
aguuuggggucgugcagaggucag

SEQ ID NO: 7499 - RNA, 18 nt, Artificial Sequence
  Sythetic
aggcagagggcgggagag

SEQ ID NO: 7500 - RNA, 19 nt, Artificial Sequence
  Sythetic
uaggcagagggcgggagag

SEQ ID NO: 7501 - RNA, 20 nt, Artificial Sequence
  Sythetic
guaggcagagggcgggagag

SEQ ID NO: 7502 - RNA, 21 nt, Artificial Sequence
  Sythetic
aguaggcagagggcgggagag

SEQ ID NO: 7503 - RNA, 22 nt, Artificial Sequence
  Sythetic
caguaggcagagggcgggagag

SEQ ID NO: 7504 - RNA, 23 nt, Artificial Sequence
  Sythetic
acaguaggcagagggcgggagag

SEQ ID NO: 7505 - RNA, 24 nt, Artificial Sequence
  Sythetic
cacaguaggcagagggcgggagag

SEQ ID NO: 7506 - RNA, 18 nt, Artificial Sequence
  Sythetic
gauacuuucagaagaagg

SEQ ID NO: 7507 - RNA, 19 nt, Artificial Sequence
  Sythetic
agauacuuucagaagaagg

SEQ ID NO: 7508 - RNA, 20 nt, Artificial Sequence
  Sythetic
gagauacuuucagaagaagg

SEQ ID NO: 7509 - RNA, 21 nt, Artificial Sequence
  Sythetic
ggagauacuuucagaagaagg

SEQ ID NO: 7510 - RNA, 22 nt, Artificial Sequence
  Sythetic
aggagauacuuucagaagaagg

SEQ ID NO: 7511 - RNA, 23 nt, Artificial Sequence
  Sythetic
uaggagauacuuucagaagaagg

SEQ ID NO: 7512 - RNA, 24 nt, Artificial Sequence
  Sythetic
uuaggagauacuuucagaagaagg

SEQ ID NO: 7513 - RNA, 18 nt, Artificial Sequence
  Sythetic
gagggcggcgugccuggg

SEQ ID NO: 7514 - RNA, 19 nt, Artificial Sequence
  Sythetic
ggagggcggcgugccuggg

SEQ ID NO: 7515 - RNA, 20 nt, Artificial Sequence
  Sythetic
cggagggcggcgugccuggg

SEQ ID NO: 7516 - RNA, 21 nt, Artificial Sequence
  Sythetic
gcggagggcggcgugccuggg

SEQ ID NO: 7517 - RNA, 22 nt, Artificial Sequence
  Sythetic
ggcggagggcggcgugccuggg

SEQ ID NO: 7518 - RNA, 23 nt, Artificial Sequence
  Sythetic
aggcggagggcggcgugccuggg

SEQ ID NO: 7519 - RNA, 24 nt, Artificial Sequence
  Sythetic
gaggcggagggcggcgugccuggg

SEQ ID NO: 7520 - RNA, 18 nt, Artificial Sequence
  Sythetic
aaaaguaugcuuuauuau

SEQ ID NO: 7521 - RNA, 19 nt, Artificial Sequence
  Sythetic
uaaaaguaugcuuuauuau

SEQ ID NO: 7522 - RNA, 20 nt, Artificial Sequence
  Sythetic
cuaaaaguaugcuuuauuau

SEQ ID NO: 7523 - RNA, 21 nt, Artificial Sequence
  Sythetic
ccuaaaaguaugcuuuauuau

SEQ ID NO: 7524 - RNA, 22 nt, Artificial Sequence
  Sythetic
uccuaaaaguaugcuuuauuau

SEQ ID NO: 7525 - RNA, 23 nt, Artificial Sequence
  Sythetic
auccuaaaaguaugcuuuauuau

SEQ ID NO: 7526 - RNA, 24 nt, Artificial Sequence
  Sythetic
uauccuaaaaguaugcuuuauuau

SEQ ID NO: 7527 - RNA, 18 nt, Artificial Sequence
  Sythetic
cgagugguggcagcagcu

SEQ ID NO: 7528 - RNA, 19 nt, Artificial Sequence
  Sythetic
ucgagugguggcagcagcu

SEQ ID NO: 7529 - RNA, 20 nt, Artificial Sequence
  Sythetic
aucgagugguggcagcagcu

SEQ ID NO: 7530 - RNA, 21 nt, Artificial Sequence
  Sythetic
gaucgagugguggcagcagcu

SEQ ID NO: 7531 - RNA, 22 nt, Artificial Sequence
  Sythetic
ggaucgagugguggcagcagcu

SEQ ID NO: 7532 - RNA, 23 nt, Artificial Sequence
  Sythetic
gggaucgagugguggcagcagcu

SEQ ID NO: 7533 - RNA, 24 nt, Artificial Sequence
  Sythetic
ggggaucgagugguggcagcagcu

SEQ ID NO: 7534 - RNA, 18 nt, Artificial Sequence
  Sythetic
uugauccgcccgcgcgcu

SEQ ID NO: 7535 - RNA, 19 nt, Artificial Sequence
  Sythetic
guugauccgcccgcgcgcu

SEQ ID NO: 7536 - RNA, 20 nt, Artificial Sequence
  Sythetic
aguugauccgcccgcgcgcu

SEQ ID NO: 7537 - RNA, 21 nt, Artificial Sequence
  Sythetic
gaguugauccgcccgcgcgcu

SEQ ID NO: 7538 - RNA, 22 nt, Artificial Sequence
  Sythetic
ggaguugauccgcccgcgcgcu

SEQ ID NO: 7539 - RNA, 23 nt, Artificial Sequence
  Sythetic
aggaguugauccgcccgcgcgcu

SEQ ID NO: 7540 - RNA, 24 nt, Artificial Sequence
  Sythetic
uaggaguugauccgcccgcgcgcu

SEQ ID NO: 7541 - RNA, 18 nt, Artificial Sequence
  Sythetic
ucauucucacaacaccgu

SEQ ID NO: 7542 - RNA, 19 nt, Artificial Sequence
  Sythetic
uucauucucacaacaccgu

SEQ ID NO: 7543 - RNA, 20 nt, Artificial Sequence
  Sythetic
auucauucucacaacaccgu

SEQ ID NO: 7544 - RNA, 21 nt, Artificial Sequence
  Sythetic
cauucauucucacaacaccgu

SEQ ID NO: 7545 - RNA, 22 nt, Artificial Sequence
  Sythetic
ucauucauucucacaacaccgu

SEQ ID NO: 7546 - RNA, 23 nt, Artificial Sequence
  Sythetic
cucauucauucucacaacaccgu

SEQ ID NO: 7547 - RNA, 24 nt, Artificial Sequence
  Sythetic
acucauucauucucacaacaccgu

SEQ ID NO: 7548 - RNA, 18 nt, Artificial Sequence
  Sythetic
uggagcgaguuacauugu

SEQ ID NO: 7549 - RNA, 19 nt, Artificial Sequence
  Sythetic
uuggagcgaguuacauugu

SEQ ID NO: 7550 - RNA, 20 nt, Artificial Sequence
  Sythetic
cuuggagcgaguuacauugu

SEQ ID NO: 7551 - RNA, 21 nt, Artificial Sequence
  Sythetic
ucuuggagcgaguuacauugu

SEQ ID NO: 7552 - RNA, 22 nt, Artificial Sequence
  Sythetic
gucuuggagcgaguuacauugu

SEQ ID NO: 7553 - RNA, 23 nt, Artificial Sequence
  Sythetic
ugucuuggagcgaguuacauugu

SEQ ID NO: 7554 - RNA, 24 nt, Artificial Sequence
  Sythetic
augucuuggagcgaguuacauugu

SEQ ID NO: 7555 - RNA, 18 nt, Artificial Sequence
  Sythetic
uugcgcccgcuuuaacuu

SEQ ID NO: 7556 - RNA, 19 nt, Artificial Sequence
  Sythetic
auugcgcccgcuuuaacuu

SEQ ID NO: 7557 - RNA, 20 nt, Artificial Sequence
  Sythetic
gauugcgcccgcuuuaacuu

SEQ ID NO: 7558 - RNA, 21 nt, Artificial Sequence
  Sythetic
agauugcgcccgcuuuaacuu

SEQ ID NO: 7559 - RNA, 22 nt, Artificial Sequence
  Sythetic
gagauugcgcccgcuuuaacuu

SEQ ID NO: 7560 - RNA, 23 nt, Artificial Sequence
  Sythetic
ggagauugcgcccgcuuuaacuu

SEQ ID NO: 7561 - RNA, 24 nt, Artificial Sequence
  Sythetic
aggagauugcgcccgcuuuaacuu

SEQ ID NO: 7562 - RNA, 18 nt, Artificial Sequence
  Sythetic
uccugcaguucgagaguu

SEQ ID NO: 7563 - RNA, 19 nt, Artificial Sequence
  Sythetic
guccugcaguucgagaguu

SEQ ID NO: 7564 - RNA, 20 nt, Artificial Sequence
  Sythetic
gguccugcaguucgagaguu

SEQ ID NO: 7565 - RNA, 21 nt, Artificial Sequence
  Sythetic
ggguccugcaguucgagaguu

SEQ ID NO: 7566 - RNA, 22 nt, Artificial Sequence
  Sythetic
uggguccugcaguucgagaguu

SEQ ID NO: 7567 - RNA, 23 nt, Artificial Sequence
  Sythetic
guggguccugcaguucgagaguu

SEQ ID NO: 7568 - RNA, 24 nt, Artificial Sequence
  Sythetic
aguggguccugcaguucgagaguu

SEQ ID NO: 7569 - RNA, 18 nt, Artificial Sequence
  Sythetic
cgcacuguucuaggcguu

SEQ ID NO: 7570 - RNA, 19 nt, Artificial Sequence
  Sythetic
acgcacuguucuaggcguu

SEQ ID NO: 7571 - RNA, 20 nt, Artificial Sequence
  Sythetic
cacgcacuguucuaggcguu

SEQ ID NO: 7572 - RNA, 21 nt, Artificial Sequence
  Sythetic
ccacgcacuguucuaggcguu

SEQ ID NO: 7573 - RNA, 22 nt, Artificial Sequence
  Sythetic
gccacgcacuguucuaggcguu

SEQ ID NO: 7574 - RNA, 23 nt, Artificial Sequence
  Sythetic
ugccacgcacuguucuaggcguu

SEQ ID NO: 7575 - RNA, 24 nt, Artificial Sequence
  Sythetic
gugccacgcacuguucuaggcguu

SEQ ID NO: 7576 - RNA, 18 nt, Artificial Sequence
  Sythetic
cagcugcgcggugucaaa

SEQ ID NO: 7577 - RNA, 19 nt, Artificial Sequence
  Sythetic
gcagcugcgcggugucaaa

SEQ ID NO: 7578 - RNA, 20 nt, Artificial Sequence
  Sythetic
ggcagcugcgcggugucaaa

SEQ ID NO: 7579 - RNA, 21 nt, Artificial Sequence
  Sythetic
uggcagcugcgcggugucaaa

SEQ ID NO: 7580 - RNA, 22 nt, Artificial Sequence
  Sythetic
cuggcagcugcgcggugucaaa

SEQ ID NO: 7581 - RNA, 23 nt, Artificial Sequence
  Sythetic
gcuggcagcugcgcggugucaaa

SEQ ID NO: 7582 - RNA, 24 nt, Artificial Sequence
  Sythetic
ggcuggcagcugcgcggugucaaa

SEQ ID NO: 7583 - RNA, 18 nt, Artificial Sequence
  Sythetic
cuuaaccccgaaguuaaa

SEQ ID NO: 7584 - RNA, 19 nt, Artificial Sequence
  Sythetic
gcuuaaccccgaaguuaaa

SEQ ID NO: 7585 - RNA, 20 nt, Artificial Sequence
  Sythetic
cgcuuaaccccgaaguuaaa

SEQ ID NO: 7586 - RNA, 21 nt, Artificial Sequence
  Sythetic
gcgcuuaaccccgaaguuaaa

SEQ ID NO: 7587 - RNA, 22 nt, Artificial Sequence
  Sythetic
ggcgcuuaaccccgaaguuaaa

SEQ ID NO: 7588 - RNA, 23 nt, Artificial Sequence
  Sythetic
aggcgcuuaaccccgaaguuaaa

SEQ ID NO: 7589 - RNA, 24 nt, Artificial Sequence
  Sythetic
caggcgcuuaaccccgaaguuaaa

SEQ ID NO: 7590 - RNA, 18 nt, Artificial Sequence
  Sythetic
gcagcugcgcggugucaa

SEQ ID NO: 7591 - RNA, 19 nt, Artificial Sequence
  Sythetic
ggcagcugcgcggugucaa

SEQ ID NO: 7592 - RNA, 20 nt, Artificial Sequence
  Sythetic
uggcagcugcgcggugucaa

SEQ ID NO: 7593 - RNA, 21 nt, Artificial Sequence
  Sythetic
cuggcagcugcgcggugucaa

SEQ ID NO: 7594 - RNA, 22 nt, Artificial Sequence
  Sythetic
gcuggcagcugcgcggugucaa

SEQ ID NO: 7595 - RNA, 23 nt, Artificial Sequence
  Sythetic
ggcuggcagcugcgcggugucaa

SEQ ID NO: 7596 - RNA, 24 nt, Artificial Sequence
  Sythetic
gggcuggcagcugcgcggugucaa

SEQ ID NO: 7597 - RNA, 18 nt, Artificial Sequence
  Sythetic
ggcagcugcgcgguguca

SEQ ID NO: 7598 - RNA, 19 nt, Artificial Sequence
  Sythetic
uggcagcugcgcgguguca

SEQ ID NO: 7599 - RNA, 20 nt, Artificial Sequence
  Sythetic
cuggcagcugcgcgguguca

SEQ ID NO: 7600 - RNA, 21 nt, Artificial Sequence
  Sythetic
gcuggcagcugcgcgguguca

SEQ ID NO: 7601 - RNA, 22 nt, Artificial Sequence
  Sythetic
ggcuggcagcugcgcgguguca

SEQ ID NO: 7602 - RNA, 23 nt, Artificial Sequence
  Sythetic
gggcuggcagcugcgcgguguca

SEQ ID NO: 7603 - RNA, 24 nt, Artificial Sequence
  Sythetic
agggcuggcagcugcgcgguguca

SEQ ID NO: 7604 - RNA, 18 nt, Artificial Sequence
  Sythetic
agacgccgaguaugggga

SEQ ID NO: 7605 - RNA, 19 nt, Artificial Sequence
  Sythetic
aagacgccgaguaugggga

SEQ ID NO: 7606 - RNA, 20 nt, Artificial Sequence
  Sythetic
gaagacgccgaguaugggga

SEQ ID NO: 7607 - RNA, 18 nt, Artificial Sequence
  Sythetic
uucguccuucuauaaaua

SEQ ID NO: 7608 - RNA, 19 nt, Artificial Sequence
  Sythetic
guucguccuucuauaaaua

SEQ ID NO: 7609 - RNA, 20 nt, Artificial Sequence
  Sythetic
aguucguccuucuauaaaua

SEQ ID NO: 7610 - RNA, 21 nt, Artificial Sequence
  Sythetic
caguucguccuucuauaaaua

SEQ ID NO: 7611 - RNA, 22 nt, Artificial Sequence
  Sythetic
gcaguucguccuucuauaaaua

SEQ ID NO: 7612 - RNA, 23 nt, Artificial Sequence
  Sythetic
cgcaguucguccuucuauaaaua

SEQ ID NO: 7613 - RNA, 24 nt, Artificial Sequence
  Sythetic
acgcaguucguccuucuauaaaua

SEQ ID NO: 7614 - RNA, 18 nt, Artificial Sequence
  Sythetic
accgcuauuaugaaauua

SEQ ID NO: 7615 - RNA, 19 nt, Artificial Sequence
  Sythetic
uaccgcuauuaugaaauua

SEQ ID NO: 7616 - RNA, 20 nt, Artificial Sequence
  Sythetic
uuaccgcuauuaugaaauua

SEQ ID NO: 7617 - RNA, 21 nt, Artificial Sequence
  Sythetic
guuaccgcuauuaugaaauua

SEQ ID NO: 7618 - RNA, 22 nt, Artificial Sequence
  Sythetic
gguuaccgcuauuaugaaauua

SEQ ID NO: 7619 - RNA, 23 nt, Artificial Sequence
  Sythetic
ugguuaccgcuauuaugaaauua

SEQ ID NO: 7620 - RNA, 24 nt, Artificial Sequence
  Sythetic
uugguuaccgcuauuaugaaauua

SEQ ID NO: 7621 - RNA, 18 nt, Artificial Sequence
  Sythetic
gucaccaggcgcuuaacc

SEQ ID NO: 7622 - RNA, 19 nt, Artificial Sequence
  Sythetic
agucaccaggcgcuuaacc

SEQ ID NO: 7623 - RNA, 20 nt, Artificial Sequence
  Sythetic
cagucaccaggcgcuuaacc

SEQ ID NO: 7624 - RNA, 21 nt, Artificial Sequence
  Sythetic
acagucaccaggcgcuuaacc

SEQ ID NO: 7625 - RNA, 22 nt, Artificial Sequence
  Sythetic
aacagucaccaggcgcuuaacc

SEQ ID NO: 7626 - RNA, 23 nt, Artificial Sequence
  Sythetic
gaacagucaccaggcgcuuaacc

SEQ ID NO: 7627 - RNA, 24 nt, Artificial Sequence
  Sythetic
agaacagucaccaggcgcuuaacc

SEQ ID NO: 7628 - RNA, 18 nt, Artificial Sequence
  Sythetic
cguacccgcuccuauccc

SEQ ID NO: 7629 - RNA, 19 nt, Artificial Sequence
  Sythetic
ccguacccgcuccuauccc

SEQ ID NO: 7630 - RNA, 20 nt, Artificial Sequence
  Sythetic
cccguacccgcuccuauccc

SEQ ID NO: 7631 - RNA, 21 nt, Artificial Sequence
  Sythetic
ccccguacccgcuccuauccc

SEQ ID NO: 7632 - RNA, 22 nt, Artificial Sequence
  Sythetic
accccguacccgcuccuauccc

SEQ ID NO: 7633 - RNA, 23 nt, Artificial Sequence
  Sythetic
caccccguacccgcuccuauccc

SEQ ID NO: 7634 - RNA, 24 nt, Artificial Sequence
  Sythetic
ucaccccguacccgcuccuauccc

SEQ ID NO: 7635 - RNA, 18 nt, Artificial Sequence
  Sythetic
cgcuggauccccaacgcc

SEQ ID NO: 7636 - RNA, 19 nt, Artificial Sequence
  Sythetic
acgcuggauccccaacgcc

SEQ ID NO: 7637 - RNA, 20 nt, Artificial Sequence
  Sythetic
cacgcuggauccccaacgcc

SEQ ID NO: 7638 - RNA, 21 nt, Artificial Sequence
  Sythetic
ucacgcuggauccccaacgcc

SEQ ID NO: 7639 - RNA, 22 nt, Artificial Sequence
  Sythetic
uucacgcuggauccccaacgcc

SEQ ID NO: 7640 - RNA, 23 nt, Artificial Sequence
  Sythetic
guucacgcuggauccccaacgcc

SEQ ID NO: 7641 - RNA, 24 nt, Artificial Sequence
  Sythetic
gguucacgcuggauccccaacgcc

SEQ ID NO: 7642 - RNA, 18 nt, Artificial Sequence
  Sythetic
caggacccacucgcggcc

SEQ ID NO: 7643 - RNA, 19 nt, Artificial Sequence
  Sythetic
gcaggacccacucgcggcc

SEQ ID NO: 7644 - RNA, 20 nt, Artificial Sequence
  Sythetic
ugcaggacccacucgcggcc

SEQ ID NO: 7645 - RNA, 21 nt, Artificial Sequence
  Sythetic
cugcaggacccacucgcggcc

SEQ ID NO: 7646 - RNA, 22 nt, Artificial Sequence
  Sythetic
acugcaggacccacucgcggcc

SEQ ID NO: 7647 - RNA, 23 nt, Artificial Sequence
  Sythetic
aacugcaggacccacucgcggcc

SEQ ID NO: 7648 - RNA, 24 nt, Artificial Sequence
  Sythetic
gaacugcaggacccacucgcggcc

SEQ ID NO: 7649 - RNA, 18 nt, Artificial Sequence
  Sythetic
ccguacccgcuccuaucc

SEQ ID NO: 7650 - RNA, 19 nt, Artificial Sequence
  Sythetic
cccguacccgcuccuaucc

SEQ ID NO: 7651 - RNA, 20 nt, Artificial Sequence
  Sythetic
ccccguacccgcuccuaucc

SEQ ID NO: 7652 - RNA, 21 nt, Artificial Sequence
  Sythetic
accccguacccgcuccuaucc

SEQ ID NO: 7653 - RNA, 22 nt, Artificial Sequence
  Sythetic
caccccguacccgcuccuaucc

SEQ ID NO: 7654 - RNA, 23 nt, Artificial Sequence
  Sythetic
ucaccccguacccgcuccuaucc

SEQ ID NO: 7655 - RNA, 24 nt, Artificial Sequence
  Sythetic
cucaccccguacccgcuccuaucc

SEQ ID NO: 7656 - RNA, 18 nt, Artificial Sequence
  Sythetic
gcgggcgcaaucuccucc

SEQ ID NO: 7657 - RNA, 19 nt, Artificial Sequence
  Sythetic
agcgggcgcaaucuccucc

SEQ ID NO: 7658 - RNA, 20 nt, Artificial Sequence
  Sythetic
aagcgggcgcaaucuccucc

SEQ ID NO: 7659 - RNA, 21 nt, Artificial Sequence
  Sythetic
aaagcgggcgcaaucuccucc

SEQ ID NO: 7660 - RNA, 22 nt, Artificial Sequence
  Sythetic
uaaagcgggcgcaaucuccucc

SEQ ID NO: 7661 - RNA, 23 nt, Artificial Sequence
  Sythetic
uuaaagcgggcgcaaucuccucc

SEQ ID NO: 7662 - RNA, 24 nt, Artificial Sequence
  Sythetic
guuaaagcgggcgcaaucuccucc

SEQ ID NO: 7663 - RNA, 18 nt, Artificial Sequence
  Sythetic
cccucaaacccaaagcgc

SEQ ID NO: 7664 - RNA, 19 nt, Artificial Sequence
  Sythetic
ccccucaaacccaaagcgc

SEQ ID NO: 7665 - RNA, 20 nt, Artificial Sequence
  Sythetic
cccccucaaacccaaagcgc

SEQ ID NO: 7666 - RNA, 21 nt, Artificial Sequence
  Sythetic
ucccccucaaacccaaagcgc

SEQ ID NO: 7667 - RNA, 22 nt, Artificial Sequence
  Sythetic
uucccccucaaacccaaagcgc

SEQ ID NO: 7668 - RNA, 23 nt, Artificial Sequence
  Sythetic
uuucccccucaaacccaaagcgc

SEQ ID NO: 7669 - RNA, 24 nt, Artificial Sequence
  Sythetic
uuuucccccucaaacccaaagcgc

SEQ ID NO: 7670 - RNA, 18 nt, Artificial Sequence
  Sythetic
aggcgcgcuucggacggc

SEQ ID NO: 7671 - RNA, 19 nt, Artificial Sequence
  Sythetic
gaggcgcgcuucggacggc

SEQ ID NO: 7672 - RNA, 20 nt, Artificial Sequence
  Sythetic
agaggcgcgcuucggacggc

SEQ ID NO: 7673 - RNA, 21 nt, Artificial Sequence
  Sythetic
aagaggcgcgcuucggacggc

SEQ ID NO: 7674 - RNA, 22 nt, Artificial Sequence
  Sythetic
gaagaggcgcgcuucggacggc

SEQ ID NO: 7675 - RNA, 23 nt, Artificial Sequence
  Sythetic
ggaagaggcgcgcuucggacggc

SEQ ID NO: 7676 - RNA, 24 nt, Artificial Sequence
  Sythetic
gggaagaggcgcgcuucggacggc

SEQ ID NO: 7677 - RNA, 18 nt, Artificial Sequence
  Sythetic
ccuggguucaagcccggc

SEQ ID NO: 7678 - RNA, 19 nt, Artificial Sequence
  Sythetic
accuggguucaagcccggc

SEQ ID NO: 7679 - RNA, 20 nt, Artificial Sequence
  Sythetic
gaccuggguucaagcccggc

SEQ ID NO: 7680 - RNA, 21 nt, Artificial Sequence
  Sythetic
agaccuggguucaagcccggc

SEQ ID NO: 7681 - RNA, 22 nt, Artificial Sequence
  Sythetic
aagaccuggguucaagcccggc

SEQ ID NO: 7682 - RNA, 23 nt, Artificial Sequence
  Sythetic
gaagaccuggguucaagcccggc

SEQ ID NO: 7683 - RNA, 24 nt, Artificial Sequence
  Sythetic
cgaagaccuggguucaagcccggc

SEQ ID NO: 7684 - RNA, 18 nt, Artificial Sequence
  Sythetic
gcccucugccuacugugc

SEQ ID NO: 7685 - RNA, 19 nt, Artificial Sequence
  Sythetic
cgcccucugccuacugugc

SEQ ID NO: 7686 - RNA, 20 nt, Artificial Sequence
  Sythetic
ccgcccucugccuacugugc

SEQ ID NO: 7687 - RNA, 21 nt, Artificial Sequence
  Sythetic
cccgcccucugccuacugugc

SEQ ID NO: 7688 - RNA, 22 nt, Artificial Sequence
  Sythetic
ucccgcccucugccuacugugc

SEQ ID NO: 7689 - RNA, 23 nt, Artificial Sequence
  Sythetic
cucccgcccucugccuacugugc

SEQ ID NO: 7690 - RNA, 24 nt, Artificial Sequence
  Sythetic
ucucccgcccucugccuacugugc

SEQ ID NO: 7691 - RNA, 18 nt, Artificial Sequence
  Sythetic
cugcacgaccccaaacuc

SEQ ID NO: 7692 - RNA, 19 nt, Artificial Sequence
  Sythetic
ucugcacgaccccaaacuc

SEQ ID NO: 7693 - RNA, 20 nt, Artificial Sequence
  Sythetic
cucugcacgaccccaaacuc

SEQ ID NO: 7694 - RNA, 21 nt, Artificial Sequence
  Sythetic
ccucugcacgaccccaaacuc

SEQ ID NO: 7695 - RNA, 22 nt, Artificial Sequence
  Sythetic
accucugcacgaccccaaacuc

SEQ ID NO: 7696 - RNA, 23 nt, Artificial Sequence
  Sythetic
gaccucugcacgaccccaaacuc

SEQ ID NO: 7697 - RNA, 24 nt, Artificial Sequence
  Sythetic
ugaccucugcacgaccccaaacuc

SEQ ID NO: 7698 - RNA, 18 nt, Artificial Sequence
  Sythetic
agcgggcgcaaucuccuc

SEQ ID NO: 7699 - RNA, 19 nt, Artificial Sequence
  Sythetic
aagcgggcgcaaucuccuc

SEQ ID NO: 7700 - RNA, 20 nt, Artificial Sequence
  Sythetic
aaagcgggcgcaaucuccuc

SEQ ID NO: 7701 - RNA, 21 nt, Artificial Sequence
  Sythetic
uaaagcgggcgcaaucuccuc

SEQ ID NO: 7702 - RNA, 22 nt, Artificial Sequence
  Sythetic
uuaaagcgggcgcaaucuccuc

SEQ ID NO: 7703 - RNA, 23 nt, Artificial Sequence
  Sythetic
guuaaagcgggcgcaaucuccuc

SEQ ID NO: 7704 - RNA, 24 nt, Artificial Sequence
  Sythetic
aguuaaagcgggcgcaaucuccuc

SEQ ID NO: 7705 - RNA, 18 nt, Artificial Sequence
  Sythetic
aaacacgcacccaguguc

SEQ ID NO: 7706 - RNA, 19 nt, Artificial Sequence
  Sythetic
caaacacgcacccaguguc

SEQ ID NO: 7707 - RNA, 20 nt, Artificial Sequence
  Sythetic
acaaacacgcacccaguguc

SEQ ID NO: 7708 - RNA, 21 nt, Artificial Sequence
  Sythetic
aacaaacacgcacccaguguc

SEQ ID NO: 7709 - RNA, 22 nt, Artificial Sequence
  Sythetic
uaacaaacacgcacccaguguc

SEQ ID NO: 7710 - RNA, 23 nt, Artificial Sequence
  Sythetic
uuaacaaacacgcacccaguguc

SEQ ID NO: 7711 - RNA, 24 nt, Artificial Sequence
  Sythetic
uuuaacaaacacgcacccaguguc

SEQ ID NO: 7712 - RNA, 18 nt, Artificial Sequence
  Sythetic
agcugcgcggugucaaag

SEQ ID NO: 7713 - RNA, 19 nt, Artificial Sequence
  Sythetic
cagcugcgcggugucaaag

SEQ ID NO: 7714 - RNA, 20 nt, Artificial Sequence
  Sythetic
gcagcugcgcggugucaaag

SEQ ID NO: 7715 - RNA, 21 nt, Artificial Sequence
  Sythetic
ggcagcugcgcggugucaaag

SEQ ID NO: 7716 - RNA, 22 nt, Artificial Sequence
  Sythetic
uggcagcugcgcggugucaaag

SEQ ID NO: 7717 - RNA, 23 nt, Artificial Sequence
  Sythetic
cuggcagcugcgcggugucaaag

SEQ ID NO: 7718 - RNA, 24 nt, Artificial Sequence
  Sythetic
gcuggcagcugcgcggugucaaag

SEQ ID NO: 7719 - RNA, 18 nt, Artificial Sequence
  Sythetic
agaggcgcgcuucggacg

SEQ ID NO: 7720 - RNA, 19 nt, Artificial Sequence
  Sythetic
aagaggcgcgcuucggacg

SEQ ID NO: 7721 - RNA, 20 nt, Artificial Sequence
  Sythetic
gaagaggcgcgcuucggacg

SEQ ID NO: 7722 - RNA, 21 nt, Artificial Sequence
  Sythetic
ggaagaggcgcgcuucggacg

SEQ ID NO: 7723 - RNA, 22 nt, Artificial Sequence
  Sythetic
gggaagaggcgcgcuucggacg

SEQ ID NO: 7724 - RNA, 23 nt, Artificial Sequence
  Sythetic
ggggaagaggcgcgcuucggacg

SEQ ID NO: 7725 - RNA, 24 nt, Artificial Sequence
  Sythetic
uggggaagaggcgcgcuucggacg

SEQ ID NO: 7726 - RNA, 18 nt, Artificial Sequence
  Sythetic
aggacccacucgcggccg

SEQ ID NO: 7727 - RNA, 19 nt, Artificial Sequence
  Sythetic
caggacccacucgcggccg

SEQ ID NO: 7728 - RNA, 20 nt, Artificial Sequence
  Sythetic
gcaggacccacucgcggccg

SEQ ID NO: 7729 - RNA, 21 nt, Artificial Sequence
  Sythetic
ugcaggacccacucgcggccg

SEQ ID NO: 7730 - RNA, 22 nt, Artificial Sequence
  Sythetic
cugcaggacccacucgcggccg

SEQ ID NO: 7731 - RNA, 23 nt, Artificial Sequence
  Sythetic
acugcaggacccacucgcggccg

SEQ ID NO: 7732 - RNA, 24 nt, Artificial Sequence
  Sythetic
aacugcaggacccacucgcggccg

SEQ ID NO: 7733 - RNA, 18 nt, Artificial Sequence
  Sythetic
gaggcgcgcuucggacgg

SEQ ID NO: 7734 - RNA, 19 nt, Artificial Sequence
  Sythetic
agaggcgcgcuucggacgg

SEQ ID NO: 7735 - RNA, 20 nt, Artificial Sequence
  Sythetic
aagaggcgcgcuucggacgg

SEQ ID NO: 7736 - RNA, 21 nt, Artificial Sequence
  Sythetic
gaagaggcgcgcuucggacgg

SEQ ID NO: 7737 - RNA, 22 nt, Artificial Sequence
  Sythetic
ggaagaggcgcgcuucggacgg

SEQ ID NO: 7738 - RNA, 23 nt, Artificial Sequence
  Sythetic
gggaagaggcgcgcuucggacgg

SEQ ID NO: 7739 - RNA, 24 nt, Artificial Sequence
  Sythetic
ggggaagaggcgcgcuucggacgg

SEQ ID NO: 7740 - RNA, 18 nt, Artificial Sequence
  Sythetic
ccacucgcggccgugggg

SEQ ID NO: 7741 - RNA, 19 nt, Artificial Sequence
  Sythetic
cccacucgcggccgugggg

SEQ ID NO: 7742 - RNA, 20 nt, Artificial Sequence
  Sythetic
acccacucgcggccgugggg

SEQ ID NO: 7743 - RNA, 21 nt, Artificial Sequence
  Sythetic
gacccacucgcggccgugggg

SEQ ID NO: 7744 - RNA, 22 nt, Artificial Sequence
  Sythetic
ggacccacucgcggccgugggg

SEQ ID NO: 7745 - RNA, 23 nt, Artificial Sequence
  Sythetic
aggacccacucgcggccgugggg

SEQ ID NO: 7746 - RNA, 24 nt, Artificial Sequence
  Sythetic
caggacccacucgcggccgugggg

SEQ ID NO: 7747 - RNA, 18 nt, Artificial Sequence
  Sythetic
ccccaaacucucgaacug

SEQ ID NO: 7748 - RNA, 19 nt, Artificial Sequence
  Sythetic
accccaaacucucgaacug

SEQ ID NO: 7749 - RNA, 20 nt, Artificial Sequence
  Sythetic
gaccccaaacucucgaacug

SEQ ID NO: 7750 - RNA, 21 nt, Artificial Sequence
  Sythetic
cgaccccaaacucucgaacug

SEQ ID NO: 7751 - RNA, 22 nt, Artificial Sequence
  Sythetic
acgaccccaaacucucgaacug

SEQ ID NO: 7752 - RNA, 23 nt, Artificial Sequence
  Sythetic
cacgaccccaaacucucgaacug

SEQ ID NO: 7753 - RNA, 24 nt, Artificial Sequence
  Sythetic
gcacgaccccaaacucucgaacug

SEQ ID NO: 7754 - RNA, 18 nt, Artificial Sequence
  Sythetic
gacccacucgcggccgug

SEQ ID NO: 7755 - RNA, 19 nt, Artificial Sequence
  Sythetic
ggacccacucgcggccgug

SEQ ID NO: 7756 - RNA, 20 nt, Artificial Sequence
  Sythetic
aggacccacucgcggccgug

SEQ ID NO: 7757 - RNA, 21 nt, Artificial Sequence
  Sythetic
caggacccacucgcggccgug

SEQ ID NO: 7758 - RNA, 22 nt, Artificial Sequence
  Sythetic
gcaggacccacucgcggccgug

SEQ ID NO: 7759 - RNA, 23 nt, Artificial Sequence
  Sythetic
ugcaggacccacucgcggccgug

SEQ ID NO: 7760 - RNA, 24 nt, Artificial Sequence
  Sythetic
cugcaggacccacucgcggccgug

SEQ ID NO: 7761 - RNA, 18 nt, Artificial Sequence
  Sythetic
cgcccucugccuacugug

SEQ ID NO: 7762 - RNA, 19 nt, Artificial Sequence
  Sythetic
ccgcccucugccuacugug

SEQ ID NO: 7763 - RNA, 20 nt, Artificial Sequence
  Sythetic
cccgcccucugccuacugug

SEQ ID NO: 7764 - RNA, 21 nt, Artificial Sequence
  Sythetic
ucccgcccucugccuacugug

SEQ ID NO: 7765 - RNA, 22 nt, Artificial Sequence
  Sythetic
cucccgcccucugccuacugug

SEQ ID NO: 7766 - RNA, 23 nt, Artificial Sequence
  Sythetic
ucucccgcccucugccuacugug

SEQ ID NO: 7767 - RNA, 24 nt, Artificial Sequence
  Sythetic
cucucccgcccucugccuacugug

SEQ ID NO: 7768 - RNA, 18 nt, Artificial Sequence
  Sythetic
uugcugguuucuccgaau

SEQ ID NO: 7769 - RNA, 19 nt, Artificial Sequence
  Sythetic
uuugcugguuucuccgaau

SEQ ID NO: 7770 - RNA, 20 nt, Artificial Sequence
  Sythetic
auuugcugguuucuccgaau

SEQ ID NO: 7771 - RNA, 21 nt, Artificial Sequence
  Sythetic
uauuugcugguuucuccgaau

SEQ ID NO: 7772 - RNA, 22 nt, Artificial Sequence
  Sythetic
uuauuugcugguuucuccgaau

SEQ ID NO: 7773 - RNA, 23 nt, Artificial Sequence
  Sythetic
cuuauuugcugguuucuccgaau

SEQ ID NO: 7774 - RNA, 24 nt, Artificial Sequence
  Sythetic
gcuuauuugcugguuucuccgaau

SEQ ID NO: 7775 - RNA, 18 nt, Artificial Sequence
  Sythetic
gccaccacucgauccccu

SEQ ID NO: 7776 - RNA, 19 nt, Artificial Sequence
  Sythetic
ugccaccacucgauccccu

SEQ ID NO: 7777 - RNA, 20 nt, Artificial Sequence
  Sythetic
cugccaccacucgauccccu

SEQ ID NO: 7778 - RNA, 21 nt, Artificial Sequence
  Sythetic
gcugccaccacucgauccccu

SEQ ID NO: 7779 - RNA, 22 nt, Artificial Sequence
  Sythetic
ugcugccaccacucgauccccu

SEQ ID NO: 7780 - RNA, 23 nt, Artificial Sequence
  Sythetic
cugcugccaccacucgauccccu

SEQ ID NO: 7781 - RNA, 24 nt, Artificial Sequence
  Sythetic
gcugcugccaccacucgauccccu

SEQ ID NO: 7782 - RNA, 18 nt, Artificial Sequence
  Sythetic
cgggcgcaaucuccuccu

SEQ ID NO: 7783 - RNA, 19 nt, Artificial Sequence
  Sythetic
gcgggcgcaaucuccuccu

SEQ ID NO: 7784 - RNA, 20 nt, Artificial Sequence
  Sythetic
agcgggcgcaaucuccuccu

SEQ ID NO: 7785 - RNA, 21 nt, Artificial Sequence
  Sythetic
aagcgggcgcaaucuccuccu

SEQ ID NO: 7786 - RNA, 22 nt, Artificial Sequence
  Sythetic
aaagcgggcgcaaucuccuccu

SEQ ID NO: 7787 - RNA, 23 nt, Artificial Sequence
  Sythetic
uaaagcgggcgcaaucuccuccu

SEQ ID NO: 7788 - RNA, 24 nt, Artificial Sequence
  Sythetic
uuaaagcgggcgcaaucuccuccu

SEQ ID NO: 7789 - RNA, 18 nt, Artificial Sequence
  Sythetic
guggggaagaggcgcgcu

SEQ ID NO: 7790 - RNA, 19 nt, Artificial Sequence
  Sythetic
cguggggaagaggcgcgcu

SEQ ID NO: 7791 - RNA, 20 nt, Artificial Sequence
  Sythetic
ccguggggaagaggcgcgcu

SEQ ID NO: 7792 - RNA, 21 nt, Artificial Sequence
  Sythetic
gccguggggaagaggcgcgcu

SEQ ID NO: 7793 - RNA, 22 nt, Artificial Sequence
  Sythetic
ggccguggggaagaggcgcgcu

SEQ ID NO: 7794 - RNA, 23 nt, Artificial Sequence
  Sythetic
cggccguggggaagaggcgcgcu

SEQ ID NO: 7795 - RNA, 24 nt, Artificial Sequence
  Sythetic
gcggccguggggaagaggcgcgcu

SEQ ID NO: 7796 - RNA, 18 nt, Artificial Sequence
  Sythetic
cccucugccuacugugcu

SEQ ID NO: 7797 - RNA, 19 nt, Artificial Sequence
  Sythetic
gcccucugccuacugugcu

SEQ ID NO: 7798 - RNA, 20 nt, Artificial Sequence
  Sythetic
cgcccucugccuacugugcu

SEQ ID NO: 7799 - RNA, 21 nt, Artificial Sequence
  Sythetic
ccgcccucugccuacugugcu

SEQ ID NO: 7800 - RNA, 22 nt, Artificial Sequence
  Sythetic
cccgcccucugccuacugugcu

SEQ ID NO: 7801 - RNA, 23 nt, Artificial Sequence
  Sythetic
ucccgcccucugccuacugugcu

SEQ ID NO: 7802 - RNA, 24 nt, Artificial Sequence
  Sythetic
cucccgcccucugccuacugugcu

SEQ ID NO: 7803 - RNA, 18 nt, Artificial Sequence
  Sythetic
uccccggagcgcaaaucu

SEQ ID NO: 7804 - RNA, 19 nt, Artificial Sequence
  Sythetic
auccccggagcgcaaaucu

SEQ ID NO: 7805 - RNA, 20 nt, Artificial Sequence
  Sythetic
uauccccggagcgcaaaucu

SEQ ID NO: 7806 - RNA, 21 nt, Artificial Sequence
  Sythetic
cuauccccggagcgcaaaucu

SEQ ID NO: 7807 - RNA, 22 nt, Artificial Sequence
  Sythetic
ccuauccccggagcgcaaaucu

SEQ ID NO: 7808 - RNA, 23 nt, Artificial Sequence
  Sythetic
uccuauccccggagcgcaaaucu

SEQ ID NO: 7809 - RNA, 24 nt, Artificial Sequence
  Sythetic
cuccuauccccggagcgcaaaucu

SEQ ID NO: 7810 - RNA, 18 nt, Artificial Sequence
  Sythetic
cccuggcauuucaucucu

SEQ ID NO: 7811 - RNA, 19 nt, Artificial Sequence
  Sythetic
ucccuggcauuucaucucu

SEQ ID NO: 7812 - RNA, 20 nt, Artificial Sequence
  Sythetic
aucccuggcauuucaucucu

SEQ ID NO: 7813 - RNA, 21 nt, Artificial Sequence
  Sythetic
caucccuggcauuucaucucu

SEQ ID NO: 7814 - RNA, 22 nt, Artificial Sequence
  Sythetic
ccaucccuggcauuucaucucu

SEQ ID NO: 7815 - RNA, 23 nt, Artificial Sequence
  Sythetic
cccaucccuggcauuucaucucu

SEQ ID NO: 7816 - RNA, 24 nt, Artificial Sequence
  Sythetic
gcccaucccuggcauuucaucucu

SEQ ID NO: 7817 - RNA, 18 nt, Artificial Sequence
  Sythetic
ggacccacucgcggccgu

SEQ ID NO: 7818 - RNA, 19 nt, Artificial Sequence
  Sythetic
aggacccacucgcggccgu

SEQ ID NO: 7819 - RNA, 20 nt, Artificial Sequence
  Sythetic
caggacccacucgcggccgu

SEQ ID NO: 7820 - RNA, 21 nt, Artificial Sequence
  Sythetic
gcaggacccacucgcggccgu

SEQ ID NO: 7821 - RNA, 22 nt, Artificial Sequence
  Sythetic
ugcaggacccacucgcggccgu

SEQ ID NO: 7822 - RNA, 23 nt, Artificial Sequence
  Sythetic
cugcaggacccacucgcggccgu

SEQ ID NO: 7823 - RNA, 24 nt, Artificial Sequence
  Sythetic
acugcaggacccacucgcggccgu

SEQ ID NO: 7824 - RNA, 18 nt, Artificial Sequence
  Sythetic
gaauugguuaccgcuauu

SEQ ID NO: 7825 - RNA, 19 nt, Artificial Sequence
  Sythetic
cgaauugguuaccgcuauu

SEQ ID NO: 7826 - RNA, 20 nt, Artificial Sequence
  Sythetic
gcgaauugguuaccgcuauu

SEQ ID NO: 7827 - RNA, 21 nt, Artificial Sequence
  Sythetic
cgcgaauugguuaccgcuauu

SEQ ID NO: 7828 - RNA, 22 nt, Artificial Sequence
  Sythetic
ucgcgaauugguuaccgcuauu

SEQ ID NO: 7829 - RNA, 23 nt, Artificial Sequence
  Sythetic
uucgcgaauugguuaccgcuauu

SEQ ID NO: 7830 - RNA, 24 nt, Artificial Sequence
  Sythetic
auucgcgaauugguuaccgcuauu

SEQ ID NO: 7831 - RNA, 18 nt, Artificial Sequence
  Sythetic
gccaaauccuaccuucuu

SEQ ID NO: 7832 - RNA, 19 nt, Artificial Sequence
  Sythetic
ugccaaauccuaccuucuu

SEQ ID NO: 7833 - RNA, 20 nt, Artificial Sequence
  Sythetic
augccaaauccuaccuucuu

SEQ ID NO: 7834 - RNA, 21 nt, Artificial Sequence
  Sythetic
uaugccaaauccuaccuucuu

SEQ ID NO: 7835 - RNA, 22 nt, Artificial Sequence
  Sythetic
uuaugccaaauccuaccuucuu

SEQ ID NO: 7836 - RNA, 23 nt, Artificial Sequence
  Sythetic
auuaugccaaauccuaccuucuu

SEQ ID NO: 7837 - RNA, 24 nt, Artificial Sequence
  Sythetic
aauuaugccaaauccuaccuucuu

SEQ ID NO: 7838 - RNA, 18 nt, Artificial Sequence
  Sythetic
uaauacccacacgguguu

SEQ ID NO: 7839 - RNA, 19 nt, Artificial Sequence
  Sythetic
guaauacccacacgguguu

SEQ ID NO: 7840 - RNA, 20 nt, Artificial Sequence
  Sythetic
gguaauacccacacgguguu

SEQ ID NO: 7841 - RNA, 21 nt, Artificial Sequence
  Sythetic
ugguaauacccacacgguguu

SEQ ID NO: 7842 - RNA, 22 nt, Artificial Sequence
  Sythetic
augguaauacccacacgguguu

SEQ ID NO: 7843 - RNA, 23 nt, Artificial Sequence
  Sythetic
gaugguaauacccacacgguguu

SEQ ID NO: 7844 - RNA, 24 nt, Artificial Sequence
  Sythetic
ugaugguaauacccacacgguguu

SEQ ID NO: 7845 - RNA, 18 nt, Artificial Sequence
  Sythetic
cucccagcacaguaggca

SEQ ID NO: 7846 - RNA, 19 nt, Artificial Sequence
  Sythetic
ucucccagcacaguaggca

SEQ ID NO: 7847 - RNA, 20 nt, Artificial Sequence
  Sythetic
gucucccagcacaguaggca

SEQ ID NO: 7848 - RNA, 21 nt, Artificial Sequence
  Sythetic
agucucccagcacaguaggca

SEQ ID NO: 7849 - RNA, 22 nt, Artificial Sequence
  Sythetic
cagucucccagcacaguaggca

SEQ ID NO: 7850 - RNA, 23 nt, Artificial Sequence
  Sythetic
ccagucucccagcacaguaggca

SEQ ID NO: 7851 - RNA, 24 nt, Artificial Sequence
  Sythetic
gccagucucccagcacaguaggca

SEQ ID NO: 7852 - RNA, 18 nt, Artificial Sequence
  Sythetic
guguggguauuaccauca

SEQ ID NO: 7853 - RNA, 19 nt, Artificial Sequence
  Sythetic
cguguggguauuaccauca

SEQ ID NO: 7854 - RNA, 20 nt, Artificial Sequence
  Sythetic
ccguguggguauuaccauca

SEQ ID NO: 7855 - RNA, 21 nt, Artificial Sequence
  Sythetic
accguguggguauuaccauca

SEQ ID NO: 7856 - RNA, 22 nt, Artificial Sequence
  Sythetic
caccguguggguauuaccauca

SEQ ID NO: 7857 - RNA, 23 nt, Artificial Sequence
  Sythetic
acaccguguggguauuaccauca

SEQ ID NO: 7858 - RNA, 24 nt, Artificial Sequence
  Sythetic
aacaccguguggguauuaccauca

SEQ ID NO: 7859 - RNA, 18 nt, Artificial Sequence
  Sythetic
ggggucgugcagagguca

SEQ ID NO: 7860 - RNA, 19 nt, Artificial Sequence
  Sythetic
uggggucgugcagagguca

SEQ ID NO: 7861 - RNA, 20 nt, Artificial Sequence
  Sythetic
uuggggucgugcagagguca

SEQ ID NO: 7862 - RNA, 21 nt, Artificial Sequence
  Sythetic
uuuggggucgugcagagguca

SEQ ID NO: 7863 - RNA, 22 nt, Artificial Sequence
  Sythetic
guuuggggucgugcagagguca

SEQ ID NO: 7864 - RNA, 23 nt, Artificial Sequence
  Sythetic
aguuuggggucgugcagagguca

SEQ ID NO: 7865 - RNA, 24 nt, Artificial Sequence
  Sythetic
gaguuuggggucgugcagagguca

SEQ ID NO: 7866 - RNA, 18 nt, Artificial Sequence
  Sythetic
uaaacucugugcggccga

SEQ ID NO: 7867 - RNA, 19 nt, Artificial Sequence
  Sythetic
uuaaacucugugcggccga

SEQ ID NO: 7868 - RNA, 20 nt, Artificial Sequence
  Sythetic
guuaaacucugugcggccga

SEQ ID NO: 7869 - RNA, 21 nt, Artificial Sequence
  Sythetic
uguuaaacucugugcggccga

SEQ ID NO: 7870 - RNA, 22 nt, Artificial Sequence
  Sythetic
uuguuaaacucugugcggccga

SEQ ID NO: 7871 - RNA, 23 nt, Artificial Sequence
  Sythetic
uuuguuaaacucugugcggccga

SEQ ID NO: 7872 - RNA, 24 nt, Artificial Sequence
  Sythetic
guuuguuaaacucugugcggccga

SEQ ID NO: 7873 - RNA, 18 nt, Artificial Sequence
  Sythetic
agauuugcgcuccgggga

SEQ ID NO: 7874 - RNA, 19 nt, Artificial Sequence
  Sythetic
gagauuugcgcuccgggga

SEQ ID NO: 7875 - RNA, 20 nt, Artificial Sequence
  Sythetic
ugagauuugcgcuccgggga

SEQ ID NO: 7876 - RNA, 21 nt, Artificial Sequence
  Sythetic
cugagauuugcgcuccgggga

SEQ ID NO: 7877 - RNA, 22 nt, Artificial Sequence
  Sythetic
ccugagauuugcgcuccgggga

SEQ ID NO: 7878 - RNA, 23 nt, Artificial Sequence
  Sythetic
cccugagauuugcgcuccgggga

SEQ ID NO: 7879 - RNA, 24 nt, Artificial Sequence
  Sythetic
gcccugagauuugcgcuccgggga

SEQ ID NO: 7880 - RNA, 18 nt, Artificial Sequence
  Sythetic
cgcgcgcuuuggguuuga

SEQ ID NO: 7881 - RNA, 19 nt, Artificial Sequence
  Sythetic
ccgcgcgcuuuggguuuga

SEQ ID NO: 7882 - RNA, 20 nt, Artificial Sequence
  Sythetic
cccgcgcgcuuuggguuuga

SEQ ID NO: 7883 - RNA, 21 nt, Artificial Sequence
  Sythetic
gcccgcgcgcuuuggguuuga

SEQ ID NO: 7884 - RNA, 22 nt, Artificial Sequence
  Sythetic
cgcccgcgcgcuuuggguuuga

SEQ ID NO: 7885 - RNA, 23 nt, Artificial Sequence
  Sythetic
ccgcccgcgcgcuuuggguuuga

SEQ ID NO: 7886 - RNA, 24 nt, Artificial Sequence
  Sythetic
uccgcccgcgcgcuuuggguuuga

SEQ ID NO: 7887 - RNA, 18 nt, Artificial Sequence
  Sythetic
cauuuaguccgauauuua

SEQ ID NO: 7888 - RNA, 19 nt, Artificial Sequence
  Sythetic
gcauuuaguccgauauuua

SEQ ID NO: 7889 - RNA, 20 nt, Artificial Sequence
  Sythetic
ugcauuuaguccgauauuua

SEQ ID NO: 7890 - RNA, 21 nt, Artificial Sequence
  Sythetic
augcauuuaguccgauauuua

SEQ ID NO: 7891 - RNA, 22 nt, Artificial Sequence
  Sythetic
gaugcauuuaguccgauauuua

SEQ ID NO: 7892 - RNA, 23 nt, Artificial Sequence
  Sythetic
agaugcauuuaguccgauauuua

SEQ ID NO: 7893 - RNA, 24 nt, Artificial Sequence
  Sythetic
gagaugcauuuaguccgauauuua

SEQ ID NO: 7894 - RNA, 18 nt, Artificial Sequence
  Sythetic
cuuuuuguaacagaucac

SEQ ID NO: 7895 - RNA, 19 nt, Artificial Sequence
  Sythetic
acuuuuuguaacagaucac

SEQ ID NO: 7896 - RNA, 20 nt, Artificial Sequence
  Sythetic
uacuuuuuguaacagaucac

SEQ ID NO: 7897 - RNA, 21 nt, Artificial Sequence
  Sythetic
guacuuuuuguaacagaucac

SEQ ID NO: 7898 - RNA, 22 nt, Artificial Sequence
  Sythetic
aguacuuuuuguaacagaucac

SEQ ID NO: 7899 - RNA, 23 nt, Artificial Sequence
  Sythetic
caguacuuuuuguaacagaucac

SEQ ID NO: 7900 - RNA, 24 nt, Artificial Sequence
  Sythetic
ccaguacuuuuuguaacagaucac

SEQ ID NO: 7901 - RNA, 18 nt, Artificial Sequence
  Sythetic
ugccugggcugaguuccc

SEQ ID NO: 7902 - RNA, 19 nt, Artificial Sequence
  Sythetic
gugccugggcugaguuccc

SEQ ID NO: 7903 - RNA, 20 nt, Artificial Sequence
  Sythetic
cgugccugggcugaguuccc

SEQ ID NO: 7904 - RNA, 21 nt, Artificial Sequence
  Sythetic
gcgugccugggcugaguuccc

SEQ ID NO: 7905 - RNA, 22 nt, Artificial Sequence
  Sythetic
ggcgugccugggcugaguuccc

SEQ ID NO: 7906 - RNA, 23 nt, Artificial Sequence
  Sythetic
cggcgugccugggcugaguuccc

SEQ ID NO: 7907 - RNA, 24 nt, Artificial Sequence
  Sythetic
gcggcgugccugggcugaguuccc

SEQ ID NO: 7908 - RNA, 18 nt, Artificial Sequence
  Sythetic
gaaaccagcaaauaagcc

SEQ ID NO: 7909 - RNA, 19 nt, Artificial Sequence
  Sythetic
agaaaccagcaaauaagcc

SEQ ID NO: 7910 - RNA, 20 nt, Artificial Sequence
  Sythetic
gagaaaccagcaaauaagcc

SEQ ID NO: 7911 - RNA, 21 nt, Artificial Sequence
  Sythetic
ggagaaaccagcaaauaagcc

SEQ ID NO: 7912 - RNA, 22 nt, Artificial Sequence
  Sythetic
cggagaaaccagcaaauaagcc

SEQ ID NO: 7913 - RNA, 23 nt, Artificial Sequence
  Sythetic
ucggagaaaccagcaaauaagcc

SEQ ID NO: 7914 - RNA, 24 nt, Artificial Sequence
  Sythetic
uucggagaaaccagcaaauaagcc

SEQ ID NO: 7915 - RNA, 18 nt, Artificial Sequence
  Sythetic
accgcgcagcugccagcc

SEQ ID NO: 7916 - RNA, 19 nt, Artificial Sequence
  Sythetic
caccgcgcagcugccagcc

SEQ ID NO: 7917 - RNA, 20 nt, Artificial Sequence
  Sythetic
acaccgcgcagcugccagcc

SEQ ID NO: 7918 - RNA, 21 nt, Artificial Sequence
  Sythetic
gacaccgcgcagcugccagcc

SEQ ID NO: 7919 - RNA, 22 nt, Artificial Sequence
  Sythetic
ugacaccgcgcagcugccagcc

SEQ ID NO: 7920 - RNA, 23 nt, Artificial Sequence
  Sythetic
uugacaccgcgcagcugccagcc

SEQ ID NO: 7921 - RNA, 24 nt, Artificial Sequence
  Sythetic
uuugacaccgcgcagcugccagcc

SEQ ID NO: 7922 - RNA, 18 nt, Artificial Sequence
  Sythetic
gugccugggcugaguucc

SEQ ID NO: 7923 - RNA, 19 nt, Artificial Sequence
  Sythetic
cgugccugggcugaguucc

SEQ ID NO: 7924 - RNA, 20 nt, Artificial Sequence
  Sythetic
gcgugccugggcugaguucc

SEQ ID NO: 7925 - RNA, 21 nt, Artificial Sequence
  Sythetic
ggcgugccugggcugaguucc

SEQ ID NO: 7926 - RNA, 22 nt, Artificial Sequence
  Sythetic
cggcgugccugggcugaguucc

SEQ ID NO: 7927 - RNA, 23 nt, Artificial Sequence
  Sythetic
gcggcgugccugggcugaguucc

SEQ ID NO: 7928 - RNA, 24 nt, Artificial Sequence
  Sythetic
ggcggcgugccugggcugaguucc

SEQ ID NO: 7929 - RNA, 18 nt, Artificial Sequence
  Sythetic
agaaaccagcaaauaagc

SEQ ID NO: 7930 - RNA, 19 nt, Artificial Sequence
  Sythetic
gagaaaccagcaaauaagc

SEQ ID NO: 7931 - RNA, 20 nt, Artificial Sequence
  Sythetic
ggagaaaccagcaaauaagc

SEQ ID NO: 7932 - RNA, 21 nt, Artificial Sequence
  Sythetic
cggagaaaccagcaaauaagc

SEQ ID NO: 7933 - RNA, 22 nt, Artificial Sequence
  Sythetic
ucggagaaaccagcaaauaagc

SEQ ID NO: 7934 - RNA, 23 nt, Artificial Sequence
  Sythetic
uucggagaaaccagcaaauaagc

SEQ ID NO: 7935 - RNA, 24 nt, Artificial Sequence
  Sythetic
auucggagaaaccagcaaauaagc

SEQ ID NO: 7936 - RNA, 18 nt, Artificial Sequence
  Sythetic
aggcguuggggauccagc

SEQ ID NO: 7937 - RNA, 19 nt, Artificial Sequence
  Sythetic
uaggcguuggggauccagc

SEQ ID NO: 7938 - RNA, 20 nt, Artificial Sequence
  Sythetic
cuaggcguuggggauccagc

SEQ ID NO: 7939 - RNA, 21 nt, Artificial Sequence
  Sythetic
ucuaggcguuggggauccagc

SEQ ID NO: 7940 - RNA, 22 nt, Artificial Sequence
  Sythetic
uucuaggcguuggggauccagc

SEQ ID NO: 7941 - RNA, 23 nt, Artificial Sequence
  Sythetic
guucuaggcguuggggauccagc

SEQ ID NO: 7942 - RNA, 24 nt, Artificial Sequence
  Sythetic
uguucuaggcguuggggauccagc

SEQ ID NO: 7943 - RNA, 18 nt, Artificial Sequence
  Sythetic
ucgagugguggcagcagc

SEQ ID NO: 7944 - RNA, 19 nt, Artificial Sequence
  Sythetic
aucgagugguggcagcagc

SEQ ID NO: 7945 - RNA, 20 nt, Artificial Sequence
  Sythetic
gaucgagugguggcagcagc

SEQ ID NO: 7946 - RNA, 21 nt, Artificial Sequence
  Sythetic
ggaucgagugguggcagcagc

SEQ ID NO: 7947 - RNA, 22 nt, Artificial Sequence
  Sythetic
gggaucgagugguggcagcagc

SEQ ID NO: 7948 - RNA, 23 nt, Artificial Sequence
  Sythetic
ggggaucgagugguggcagcagc

SEQ ID NO: 7949 - RNA, 24 nt, Artificial Sequence
  Sythetic
aggggaucgagugguggcagcagc

SEQ ID NO: 7950 - RNA, 18 nt, Artificial Sequence
  Sythetic
gcacaguaggcagagggc

SEQ ID NO: 7951 - RNA, 19 nt, Artificial Sequence
  Sythetic
agcacaguaggcagagggc

SEQ ID NO: 7952 - RNA, 20 nt, Artificial Sequence
  Sythetic
cagcacaguaggcagagggc

SEQ ID NO: 7953 - RNA, 21 nt, Artificial Sequence
  Sythetic
ccagcacaguaggcagagggc

SEQ ID NO: 7954 - RNA, 22 nt, Artificial Sequence
  Sythetic
cccagcacaguaggcagagggc

SEQ ID NO: 7955 - RNA, 23 nt, Artificial Sequence
  Sythetic
ucccagcacaguaggcagagggc

SEQ ID NO: 7956 - RNA, 24 nt, Artificial Sequence
  Sythetic
cucccagcacaguaggcagagggc

SEQ ID NO: 7957 - RNA, 18 nt, Artificial Sequence
  Sythetic
agggauuccaagccgggc

SEQ ID NO: 7958 - RNA, 19 nt, Artificial Sequence
  Sythetic
cagggauuccaagccgggc

SEQ ID NO: 7959 - RNA, 20 nt, Artificial Sequence
  Sythetic
gcagggauuccaagccgggc

SEQ ID NO: 7960 - RNA, 21 nt, Artificial Sequence
  Sythetic
ggcagggauuccaagccgggc

SEQ ID NO: 7961 - RNA, 22 nt, Artificial Sequence
  Sythetic
gggcagggauuccaagccgggc

SEQ ID NO: 7962 - RNA, 23 nt, Artificial Sequence
  Sythetic
ugggcagggauuccaagccgggc

SEQ ID NO: 7963 - RNA, 24 nt, Artificial Sequence
  Sythetic
augggcagggauuccaagccgggc

SEQ ID NO: 7964 - RNA, 18 nt, Artificial Sequence
  Sythetic
ggguacggggugaggggc

SEQ ID NO: 7965 - RNA, 19 nt, Artificial Sequence
  Sythetic
cggguacggggugaggggc

SEQ ID NO: 7966 - RNA, 20 nt, Artificial Sequence
  Sythetic
gcggguacggggugaggggc

SEQ ID NO: 7967 - RNA, 21 nt, Artificial Sequence
  Sythetic
agcggguacggggugaggggc

SEQ ID NO: 7968 - RNA, 22 nt, Artificial Sequence
  Sythetic
gagcggguacggggugaggggc

SEQ ID NO: 7969 - RNA, 23 nt, Artificial Sequence
  Sythetic
ggagcggguacggggugaggggc

SEQ ID NO: 7970 - RNA, 24 nt, Artificial Sequence
  Sythetic
aggagcggguacggggugaggggc

SEQ ID NO: 7971 - RNA, 18 nt, Artificial Sequence
  Sythetic
cccggagagaugaaaugc

SEQ ID NO: 7972 - RNA, 19 nt, Artificial Sequence
  Sythetic
gcccggagagaugaaaugc

SEQ ID NO: 7973 - RNA, 20 nt, Artificial Sequence
  Sythetic
agcccggagagaugaaaugc

SEQ ID NO: 7974 - RNA, 21 nt, Artificial Sequence
  Sythetic
aagcccggagagaugaaaugc

SEQ ID NO: 7975 - RNA, 22 nt, Artificial Sequence
  Sythetic
uaagcccggagagaugaaaugc

SEQ ID NO: 7976 - RNA, 23 nt, Artificial Sequence
  Sythetic
auaagcccggagagaugaaaugc

SEQ ID NO: 7977 - RNA, 24 nt, Artificial Sequence
  Sythetic
aauaagcccggagagaugaaaugc

SEQ ID NO: 7978 - RNA, 18 nt, Artificial Sequence
  Sythetic
aggcggagggcggcgugc

SEQ ID NO: 7979 - RNA, 19 nt, Artificial Sequence
  Sythetic
gaggcggagggcggcgugc

SEQ ID NO: 7980 - RNA, 20 nt, Artificial Sequence
  Sythetic
agaggcggagggcggcgugc

SEQ ID NO: 7981 - RNA, 21 nt, Artificial Sequence
  Sythetic
uagaggcggagggcggcgugc

SEQ ID NO: 7982 - RNA, 22 nt, Artificial Sequence
  Sythetic
uuagaggcggagggcggcgugc

SEQ ID NO: 7983 - RNA, 23 nt, Artificial Sequence
  Sythetic
uuuagaggcggagggcggcgugc

SEQ ID NO: 7984 - RNA, 24 nt, Artificial Sequence
  Sythetic
auuuagaggcggagggcggcgugc

SEQ ID NO: 7985 - RNA, 18 nt, Artificial Sequence
  Sythetic
gcccugagauuugcgcuc

SEQ ID NO: 7986 - RNA, 19 nt, Artificial Sequence
  Sythetic
agcccugagauuugcgcuc

SEQ ID NO: 7987 - RNA, 20 nt, Artificial Sequence
  Sythetic
cagcccugagauuugcgcuc

SEQ ID NO: 7988 - RNA, 21 nt, Artificial Sequence
  Sythetic
ccagcccugagauuugcgcuc

SEQ ID NO: 7989 - RNA, 22 nt, Artificial Sequence
  Sythetic
gccagcccugagauuugcgcuc

SEQ ID NO: 7990 - RNA, 23 nt, Artificial Sequence
  Sythetic
ugccagcccugagauuugcgcuc

SEQ ID NO: 7991 - RNA, 24 nt, Artificial Sequence
  Sythetic
cugccagcccugagauuugcgcuc

SEQ ID NO: 7992 - RNA, 18 nt, Artificial Sequence
  Sythetic
uaggauuuggcauaauuc

SEQ ID NO: 7993 - RNA, 19 nt, Artificial Sequence
  Sythetic
guaggauuuggcauaauuc

SEQ ID NO: 7994 - RNA, 20 nt, Artificial Sequence
  Sythetic
gguaggauuuggcauaauuc

SEQ ID NO: 7995 - RNA, 21 nt, Artificial Sequence
  Sythetic
agguaggauuuggcauaauuc

SEQ ID NO: 7996 - RNA, 22 nt, Artificial Sequence
  Sythetic
aagguaggauuuggcauaauuc

SEQ ID NO: 7997 - RNA, 23 nt, Artificial Sequence
  Sythetic
gaagguaggauuuggcauaauuc

SEQ ID NO: 7998 - RNA, 24 nt, Artificial Sequence
  Sythetic
agaagguaggauuuggcauaauuc

SEQ ID NO: 7999 - RNA, 18 nt, Artificial Sequence
  Sythetic
augggcagggauuccaag

SEQ ID NO: 8000 - RNA, 19 nt, Artificial Sequence
  Sythetic
gaugggcagggauuccaag

SEQ ID NO: 8001 - RNA, 20 nt, Artificial Sequence
  Sythetic
ggaugggcagggauuccaag

SEQ ID NO: 8002 - RNA, 21 nt, Artificial Sequence
  Sythetic
gggaugggcagggauuccaag

SEQ ID NO: 8003 - RNA, 22 nt, Artificial Sequence
  Sythetic
agggaugggcagggauuccaag

SEQ ID NO: 8004 - RNA, 23 nt, Artificial Sequence
  Sythetic
cagggaugggcagggauuccaag

SEQ ID NO: 8005 - RNA, 24 nt, Artificial Sequence
  Sythetic
ccagggaugggcagggauuccaag

SEQ ID NO: 8006 - RNA, 18 nt, Artificial Sequence
  Sythetic
ccugggcugaguucccag

SEQ ID NO: 8007 - RNA, 19 nt, Artificial Sequence
  Sythetic
gccugggcugaguucccag

SEQ ID NO: 8008 - RNA, 20 nt, Artificial Sequence
  Sythetic
ugccugggcugaguucccag

SEQ ID NO: 8009 - RNA, 21 nt, Artificial Sequence
  Sythetic
gugccugggcugaguucccag

SEQ ID NO: 8010 - RNA, 22 nt, Artificial Sequence
  Sythetic
cgugccugggcugaguucccag

SEQ ID NO: 8011 - RNA, 23 nt, Artificial Sequence
  Sythetic
gcgugccugggcugaguucccag

SEQ ID NO: 8012 - RNA, 24 nt, Artificial Sequence
  Sythetic
ggcgugccugggcugaguucccag

SEQ ID NO: 8013 - RNA, 18 nt, Artificial Sequence
  Sythetic
auuaggagauacuuucag

SEQ ID NO: 8014 - RNA, 19 nt, Artificial Sequence
  Sythetic
aauuaggagauacuuucag

SEQ ID NO: 8015 - RNA, 20 nt, Artificial Sequence
  Sythetic
uaauuaggagauacuuucag

SEQ ID NO: 8016 - RNA, 21 nt, Artificial Sequence
  Sythetic
auaauuaggagauacuuucag

SEQ ID NO: 8017 - RNA, 22 nt, Artificial Sequence
  Sythetic
gauaauuaggagauacuuucag

SEQ ID NO: 8018 - RNA, 23 nt, Artificial Sequence
  Sythetic
agauaauuaggagauacuuucag

SEQ ID NO: 8019 - RNA, 24 nt, Artificial Sequence
  Sythetic
cagauaauuaggagauacuuucag

SEQ ID NO: 8020 - RNA, 18 nt, Artificial Sequence
  Sythetic
gcaaauaagcccggagag

SEQ ID NO: 8021 - RNA, 19 nt, Artificial Sequence
  Sythetic
agcaaauaagcccggagag

SEQ ID NO: 8022 - RNA, 20 nt, Artificial Sequence
  Sythetic
cagcaaauaagcccggagag

SEQ ID NO: 8023 - RNA, 21 nt, Artificial Sequence
  Sythetic
ccagcaaauaagcccggagag

SEQ ID NO: 8024 - RNA, 22 nt, Artificial Sequence
  Sythetic
accagcaaauaagcccggagag

SEQ ID NO: 8025 - RNA, 23 nt, Artificial Sequence
  Sythetic
aaccagcaaauaagcccggagag

SEQ ID NO: 8026 - RNA, 24 nt, Artificial Sequence
  Sythetic
aaaccagcaaauaagcccggagag

SEQ ID NO: 8027 - RNA, 18 nt, Artificial Sequence
  Sythetic
cauugucugaauuuagag

SEQ ID NO: 8028 - RNA, 19 nt, Artificial Sequence
  Sythetic
acauugucugaauuuagag

SEQ ID NO: 8029 - RNA, 20 nt, Artificial Sequence
  Sythetic
uacauugucugaauuuagag

SEQ ID NO: 8030 - RNA, 21 nt, Artificial Sequence
  Sythetic
uuacauugucugaauuuagag

SEQ ID NO: 8031 - RNA, 22 nt, Artificial Sequence
  Sythetic
guuacauugucugaauuuagag

SEQ ID NO: 8032 - RNA, 23 nt, Artificial Sequence
  Sythetic
aguuacauugucugaauuuagag

SEQ ID NO: 8033 - RNA, 24 nt, Artificial Sequence
  Sythetic
gaguuacauugucugaauuuagag

SEQ ID NO: 8034 - RNA, 18 nt, Artificial Sequence
  Sythetic
gcgcgcuuuggguuugag

SEQ ID NO: 8035 - RNA, 19 nt, Artificial Sequence
  Sythetic
cgcgcgcuuuggguuugag

SEQ ID NO: 8036 - RNA, 20 nt, Artificial Sequence
  Sythetic
ccgcgcgcuuuggguuugag

SEQ ID NO: 8037 - RNA, 21 nt, Artificial Sequence
  Sythetic
cccgcgcgcuuuggguuugag

SEQ ID NO: 8038 - RNA, 22 nt, Artificial Sequence
  Sythetic
gcccgcgcgcuuuggguuugag

SEQ ID NO: 8039 - RNA, 23 nt, Artificial Sequence
  Sythetic
cgcccgcgcgcuuuggguuugag

SEQ ID NO: 8040 - RNA, 24 nt, Artificial Sequence
  Sythetic
ccgcccgcgcgcuuuggguuugag

SEQ ID NO: 8041 - RNA, 18 nt, Artificial Sequence
  Sythetic
uuaguccgauauuuauag

SEQ ID NO: 8042 - RNA, 19 nt, Artificial Sequence
  Sythetic
uuuaguccgauauuuauag

SEQ ID NO: 8043 - RNA, 20 nt, Artificial Sequence
  Sythetic
auuuaguccgauauuuauag

SEQ ID NO: 8044 - RNA, 21 nt, Artificial Sequence
  Sythetic
cauuuaguccgauauuuauag

SEQ ID NO: 8045 - RNA, 22 nt, Artificial Sequence
  Sythetic
gcauuuaguccgauauuuauag

SEQ ID NO: 8046 - RNA, 23 nt, Artificial Sequence
  Sythetic
ugcauuuaguccgauauuuauag

SEQ ID NO: 8047 - RNA, 24 nt, Artificial Sequence
  Sythetic
augcauuuaguccgauauuuauag

SEQ ID NO: 8048 - RNA, 18 nt, Artificial Sequence
  Sythetic
aaccagcaaauaagcccg

SEQ ID NO: 8049 - RNA, 19 nt, Artificial Sequence
  Sythetic
aaaccagcaaauaagcccg

SEQ ID NO: 8050 - RNA, 20 nt, Artificial Sequence
  Sythetic
gaaaccagcaaauaagcccg

SEQ ID NO: 8051 - RNA, 21 nt, Artificial Sequence
  Sythetic
agaaaccagcaaauaagcccg

SEQ ID NO: 8052 - RNA, 22 nt, Artificial Sequence
  Sythetic
gagaaaccagcaaauaagcccg

SEQ ID NO: 8053 - RNA, 23 nt, Artificial Sequence
  Sythetic
ggagaaaccagcaaauaagcccg

SEQ ID NO: 8054 - RNA, 24 nt, Artificial Sequence
  Sythetic
cggagaaaccagcaaauaagcccg

SEQ ID NO: 8055 - RNA, 18 nt, Artificial Sequence
  Sythetic
uuaaacucugugcggccg

SEQ ID NO: 8056 - RNA, 19 nt, Artificial Sequence
  Sythetic
guuaaacucugugcggccg

SEQ ID NO: 8057 - RNA, 20 nt, Artificial Sequence
  Sythetic
uguuaaacucugugcggccg

SEQ ID NO: 8058 - RNA, 21 nt, Artificial Sequence
  Sythetic
uuguuaaacucugugcggccg

SEQ ID NO: 8059 - RNA, 22 nt, Artificial Sequence
  Sythetic
uuuguuaaacucugugcggccg

SEQ ID NO: 8060 - RNA, 23 nt, Artificial Sequence
  Sythetic
guuuguuaaacucugugcggccg

SEQ ID NO: 8061 - RNA, 24 nt, Artificial Sequence
  Sythetic
uguuuguuaaacucugugcggccg

SEQ ID NO: 8062 - RNA, 18 nt, Artificial Sequence
  Sythetic
ugucugaauuuagaggcg

SEQ ID NO: 8063 - RNA, 19 nt, Artificial Sequence
  Sythetic
uugucugaauuuagaggcg

SEQ ID NO: 8064 - RNA, 20 nt, Artificial Sequence
  Sythetic
auugucugaauuuagaggcg

SEQ ID NO: 8065 - RNA, 21 nt, Artificial Sequence
  Sythetic
cauugucugaauuuagaggcg

SEQ ID NO: 8066 - RNA, 22 nt, Artificial Sequence
  Sythetic
acauugucugaauuuagaggcg

SEQ ID NO: 8067 - RNA, 23 nt, Artificial Sequence
  Sythetic
uacauugucugaauuuagaggcg

SEQ ID NO: 8068 - RNA, 24 nt, Artificial Sequence
  Sythetic
uuacauugucugaauuuagaggcg

SEQ ID NO: 8069 - RNA, 18 nt, Artificial Sequence
  Sythetic
cacgcacuguucuaggcg

SEQ ID NO: 8070 - RNA, 19 nt, Artificial Sequence
  Sythetic
ccacgcacuguucuaggcg

SEQ ID NO: 8071 - RNA, 20 nt, Artificial Sequence
  Sythetic
gccacgcacuguucuaggcg

SEQ ID NO: 8072 - RNA, 21 nt, Artificial Sequence
  Sythetic
ugccacgcacuguucuaggcg

SEQ ID NO: 8073 - RNA, 22 nt, Artificial Sequence
  Sythetic
gugccacgcacuguucuaggcg

SEQ ID NO: 8074 - RNA, 23 nt, Artificial Sequence
  Sythetic
cgugccacgcacuguucuaggcg

SEQ ID NO: 8075 - RNA, 24 nt, Artificial Sequence
  Sythetic
gcgugccacgcacuguucuaggcg

SEQ ID NO: 8076 - RNA, 18 nt, Artificial Sequence
  Sythetic
agacaaggcccgcauucg

SEQ ID NO: 8077 - RNA, 19 nt, Artificial Sequence
  Sythetic
cagacaaggcccgcauucg

SEQ ID NO: 8078 - RNA, 20 nt, Artificial Sequence
  Sythetic
ccagacaaggcccgcauucg

SEQ ID NO: 8079 - RNA, 21 nt, Artificial Sequence
  Sythetic
accagacaaggcccgcauucg

SEQ ID NO: 8080 - RNA, 22 nt, Artificial Sequence
  Sythetic
aaccagacaaggcccgcauucg

SEQ ID NO: 8081 - RNA, 23 nt, Artificial Sequence
  Sythetic
gaaccagacaaggcccgcauucg

SEQ ID NO: 8082 - RNA, 24 nt, Artificial Sequence
  Sythetic
ugaaccagacaaggcccgcauucg

SEQ ID NO: 8083 - RNA, 18 nt, Artificial Sequence
  Sythetic
uccgauauuuauagaagg

SEQ ID NO: 8084 - RNA, 19 nt, Artificial Sequence
  Sythetic
guccgauauuuauagaagg

SEQ ID NO: 8085 - RNA, 20 nt, Artificial Sequence
  Sythetic
aguccgauauuuauagaagg

SEQ ID NO: 8086 - RNA, 21 nt, Artificial Sequence
  Sythetic
uaguccgauauuuauagaagg

SEQ ID NO: 8087 - RNA, 22 nt, Artificial Sequence
  Sythetic
uuaguccgauauuuauagaagg

SEQ ID NO: 8088 - RNA, 23 nt, Artificial Sequence
  Sythetic
uuuaguccgauauuuauagaagg

SEQ ID NO: 8089 - RNA, 24 nt, Artificial Sequence
  Sythetic
auuuaguccgauauuuauagaagg

SEQ ID NO: 8090 - RNA, 18 nt, Artificial Sequence
  Sythetic
cugggcugaguucccagg

SEQ ID NO: 8091 - RNA, 19 nt, Artificial Sequence
  Sythetic
ccugggcugaguucccagg

SEQ ID NO: 8092 - RNA, 20 nt, Artificial Sequence
  Sythetic
gccugggcugaguucccagg

SEQ ID NO: 8093 - RNA, 21 nt, Artificial Sequence
  Sythetic
ugccugggcugaguucccagg

SEQ ID NO: 8094 - RNA, 22 nt, Artificial Sequence
  Sythetic
gugccugggcugaguucccagg

SEQ ID NO: 8095 - RNA, 23 nt, Artificial Sequence
  Sythetic
cgugccugggcugaguucccagg

SEQ ID NO: 8096 - RNA, 24 nt, Artificial Sequence
  Sythetic
gcgugccugggcugaguucccagg

SEQ ID NO: 8097 - RNA, 18 nt, Artificial Sequence
  Sythetic
cagcacaguaggcagagg

SEQ ID NO: 8098 - RNA, 19 nt, Artificial Sequence
  Sythetic
ccagcacaguaggcagagg

SEQ ID NO: 8099 - RNA, 20 nt, Artificial Sequence
  Sythetic
cccagcacaguaggcagagg

SEQ ID NO: 8100 - RNA, 21 nt, Artificial Sequence
  Sythetic
ucccagcacaguaggcagagg

SEQ ID NO: 8101 - RNA, 22 nt, Artificial Sequence
  Sythetic
cucccagcacaguaggcagagg

SEQ ID NO: 8102 - RNA, 23 nt, Artificial Sequence
  Sythetic
ucucccagcacaguaggcagagg

SEQ ID NO: 8103 - RNA, 24 nt, Artificial Sequence
  Sythetic
gucucccagcacaguaggcagagg

SEQ ID NO: 8104 - RNA, 18 nt, Artificial Sequence
  Sythetic
auugucugaauuuagagg

SEQ ID NO: 8105 - RNA, 19 nt, Artificial Sequence
  Sythetic
cauugucugaauuuagagg

SEQ ID NO: 8106 - RNA, 20 nt, Artificial Sequence
  Sythetic
acauugucugaauuuagagg

SEQ ID NO: 8107 - RNA, 21 nt, Artificial Sequence
  Sythetic
uacauugucugaauuuagagg

SEQ ID NO: 8108 - RNA, 22 nt, Artificial Sequence
  Sythetic
uuacauugucugaauuuagagg

SEQ ID NO: 8109 - RNA, 23 nt, Artificial Sequence
  Sythetic
guuacauugucugaauuuagagg

SEQ ID NO: 8110 - RNA, 24 nt, Artificial Sequence
  Sythetic
aguuacauugucugaauuuagagg

SEQ ID NO: 8111 - RNA, 18 nt, Artificial Sequence
  Sythetic
cgcgcuuuggguuugagg

SEQ ID NO: 8112 - RNA, 19 nt, Artificial Sequence
  Sythetic
gcgcgcuuuggguuugagg

SEQ ID NO: 8113 - RNA, 20 nt, Artificial Sequence
  Sythetic
cgcgcgcuuuggguuugagg

SEQ ID NO: 8114 - RNA, 21 nt, Artificial Sequence
  Sythetic
ccgcgcgcuuuggguuugagg

SEQ ID NO: 8115 - RNA, 22 nt, Artificial Sequence
  Sythetic
cccgcgcgcuuuggguuugagg

SEQ ID NO: 8116 - RNA, 23 nt, Artificial Sequence
  Sythetic
gcccgcgcgcuuuggguuugagg

SEQ ID NO: 8117 - RNA, 24 nt, Artificial Sequence
  Sythetic
cgcccgcgcgcuuuggguuugagg

SEQ ID NO: 8118 - RNA, 18 nt, Artificial Sequence
  Sythetic
gucucccagcacaguagg

SEQ ID NO: 8119 - RNA, 19 nt, Artificial Sequence
  Sythetic
agucucccagcacaguagg

SEQ ID NO: 8120 - RNA, 20 nt, Artificial Sequence
  Sythetic
cagucucccagcacaguagg

SEQ ID NO: 8121 - RNA, 21 nt, Artificial Sequence
  Sythetic
ccagucucccagcacaguagg

SEQ ID NO: 8122 - RNA, 22 nt, Artificial Sequence
  Sythetic
gccagucucccagcacaguagg

SEQ ID NO: 8123 - RNA, 23 nt, Artificial Sequence
  Sythetic
ugccagucucccagcacaguagg

SEQ ID NO: 8124 - RNA, 24 nt, Artificial Sequence
  Sythetic
gugccagucucccagcacaguagg

SEQ ID NO: 8125 - RNA, 18 nt, Artificial Sequence
  Sythetic
agagggcgggagaggcgg

SEQ ID NO: 8126 - RNA, 19 nt, Artificial Sequence
  Sythetic
cagagggcgggagaggcgg

SEQ ID NO: 8127 - RNA, 20 nt, Artificial Sequence
  Sythetic
gcagagggcgggagaggcgg

SEQ ID NO: 8128 - RNA, 21 nt, Artificial Sequence
  Sythetic
ggcagagggcgggagaggcgg

SEQ ID NO: 8129 - RNA, 22 nt, Artificial Sequence
  Sythetic
aggcagagggcgggagaggcgg

SEQ ID NO: 8130 - RNA, 23 nt, Artificial Sequence
  Sythetic
uaggcagagggcgggagaggcgg

SEQ ID NO: 8131 - RNA, 24 nt, Artificial Sequence
  Sythetic
guaggcagagggcgggagaggcgg

SEQ ID NO: 8132 - RNA, 18 nt, Artificial Sequence
  Sythetic
acaguaggcagagggcgg

SEQ ID NO: 8133 - RNA, 19 nt, Artificial Sequence
  Sythetic
cacaguaggcagagggcgg

SEQ ID NO: 8134 - RNA, 20 nt, Artificial Sequence
  Sythetic
gcacaguaggcagagggcgg

SEQ ID NO: 8135 - RNA, 21 nt, Artificial Sequence
  Sythetic
agcacaguaggcagagggcgg

SEQ ID NO: 8136 - RNA, 22 nt, Artificial Sequence
  Sythetic
cagcacaguaggcagagggcgg

SEQ ID NO: 8137 - RNA, 23 nt, Artificial Sequence
  Sythetic
ccagcacaguaggcagagggcgg

SEQ ID NO: 8138 - RNA, 24 nt, Artificial Sequence
  Sythetic
cccagcacaguaggcagagggcgg

SEQ ID NO: 8139 - RNA, 18 nt, Artificial Sequence
  Sythetic
agagaugaaaugccaggg

SEQ ID NO: 8140 - RNA, 19 nt, Artificial Sequence
  Sythetic
gagagaugaaaugccaggg

SEQ ID NO: 8141 - RNA, 20 nt, Artificial Sequence
  Sythetic
ggagagaugaaaugccaggg

SEQ ID NO: 8142 - RNA, 21 nt, Artificial Sequence
  Sythetic
cggagagaugaaaugccaggg

SEQ ID NO: 8143 - RNA, 22 nt, Artificial Sequence
  Sythetic
ccggagagaugaaaugccaggg

SEQ ID NO: 8144 - RNA, 23 nt, Artificial Sequence
  Sythetic
cccggagagaugaaaugccaggg

SEQ ID NO: 8145 - RNA, 24 nt, Artificial Sequence
  Sythetic
gcccggagagaugaaaugccaggg

SEQ ID NO: 8146 - RNA, 18 nt, Artificial Sequence
  Sythetic
agcacaguaggcagaggg

SEQ ID NO: 8147 - RNA, 19 nt, Artificial Sequence
  Sythetic
cagcacaguaggcagaggg

SEQ ID NO: 8148 - RNA, 20 nt, Artificial Sequence
  Sythetic
ccagcacaguaggcagaggg

SEQ ID NO: 8149 - RNA, 21 nt, Artificial Sequence
  Sythetic
cccagcacaguaggcagaggg

SEQ ID NO: 8150 - RNA, 22 nt, Artificial Sequence
  Sythetic
ucccagcacaguaggcagaggg

SEQ ID NO: 8151 - RNA, 23 nt, Artificial Sequence
  Sythetic
cucccagcacaguaggcagaggg

SEQ ID NO: 8152 - RNA, 24 nt, Artificial Sequence
  Sythetic
ucucccagcacaguaggcagaggg

SEQ ID NO: 8153 - RNA, 18 nt, Artificial Sequence
  Sythetic
gcggguacggggugaggg

SEQ ID NO: 8154 - RNA, 19 nt, Artificial Sequence
  Sythetic
agcggguacggggugaggg

SEQ ID NO: 8155 - RNA, 20 nt, Artificial Sequence
  Sythetic
gagcggguacggggugaggg

SEQ ID NO: 8156 - RNA, 21 nt, Artificial Sequence
  Sythetic
ggagcggguacggggugaggg

SEQ ID NO: 8157 - RNA, 22 nt, Artificial Sequence
  Sythetic
aggagcggguacggggugaggg

SEQ ID NO: 8158 - RNA, 23 nt, Artificial Sequence
  Sythetic
uaggagcggguacggggugaggg

SEQ ID NO: 8159 - RNA, 24 nt, Artificial Sequence
  Sythetic
auaggagcggguacggggugaggg

SEQ ID NO: 8160 - RNA, 18 nt, Artificial Sequence
  Sythetic
gauaggagcggguacggg

SEQ ID NO: 8161 - RNA, 19 nt, Artificial Sequence
  Sythetic
ggauaggagcggguacggg

SEQ ID NO: 8162 - RNA, 20 nt, Artificial Sequence
  Sythetic
gggauaggagcggguacggg

SEQ ID NO: 8163 - RNA, 21 nt, Artificial Sequence
  Sythetic
ggggauaggagcggguacggg

SEQ ID NO: 8164 - RNA, 22 nt, Artificial Sequence
  Sythetic
cggggauaggagcggguacggg

SEQ ID NO: 8165 - RNA, 23 nt, Artificial Sequence
  Sythetic
ccggggauaggagcggguacggg

SEQ ID NO: 8166 - RNA, 24 nt, Artificial Sequence
  Sythetic
uccggggauaggagcggguacggg

SEQ ID NO: 8167 - RNA, 18 nt, Artificial Sequence
  Sythetic
cggguacggggugagggg

SEQ ID NO: 8168 - RNA, 19 nt, Artificial Sequence
  Sythetic
gcggguacggggugagggg

SEQ ID NO: 8169 - RNA, 20 nt, Artificial Sequence
  Sythetic
agcggguacggggugagggg

SEQ ID NO: 8170 - RNA, 21 nt, Artificial Sequence
  Sythetic
gagcggguacggggugagggg

SEQ ID NO: 8171 - RNA, 22 nt, Artificial Sequence
  Sythetic
ggagcggguacggggugagggg

SEQ ID NO: 8172 - RNA, 23 nt, Artificial Sequence
  Sythetic
aggagcggguacggggugagggg

SEQ ID NO: 8173 - RNA, 24 nt, Artificial Sequence
  Sythetic
uaggagcggguacggggugagggg

SEQ ID NO: 8174 - RNA, 18 nt, Artificial Sequence
  Sythetic
ugaaaugccagggauggg

SEQ ID NO: 8175 - RNA, 19 nt, Artificial Sequence
  Sythetic
augaaaugccagggauggg

SEQ ID NO: 8176 - RNA, 20 nt, Artificial Sequence
  Sythetic
gaugaaaugccagggauggg

SEQ ID NO: 8177 - RNA, 21 nt, Artificial Sequence
  Sythetic
agaugaaaugccagggauggg

SEQ ID NO: 8178 - RNA, 22 nt, Artificial Sequence
  Sythetic
gagaugaaaugccagggauggg

SEQ ID NO: 8179 - RNA, 23 nt, Artificial Sequence
  Sythetic
agagaugaaaugccagggauggg

SEQ ID NO: 8180 - RNA, 24 nt, Artificial Sequence
  Sythetic
gagagaugaaaugccagggauggg

SEQ ID NO: 8181 - RNA, 18 nt, Artificial Sequence
  Sythetic
caccgcgccgauccucug

SEQ ID NO: 8182 - RNA, 19 nt, Artificial Sequence
  Sythetic
ccaccgcgccgauccucug

SEQ ID NO: 8183 - RNA, 20 nt, Artificial Sequence
  Sythetic
cccaccgcgccgauccucug

SEQ ID NO: 8184 - RNA, 21 nt, Artificial Sequence
  Sythetic
acccaccgcgccgauccucug

SEQ ID NO: 8185 - RNA, 22 nt, Artificial Sequence
  Sythetic
gacccaccgcgccgauccucug

SEQ ID NO: 8186 - RNA, 23 nt, Artificial Sequence
  Sythetic
ggacccaccgcgccgauccucug

SEQ ID NO: 8187 - RNA, 24 nt, Artificial Sequence
  Sythetic
uggacccaccgcgccgauccucug

SEQ ID NO: 8188 - RNA, 18 nt, Artificial Sequence
  Sythetic
cgagaguuuggggucgug

SEQ ID NO: 8189 - RNA, 19 nt, Artificial Sequence
  Sythetic
ucgagaguuuggggucgug

SEQ ID NO: 8190 - RNA, 20 nt, Artificial Sequence
  Sythetic
uucgagaguuuggggucgug

SEQ ID NO: 8191 - RNA, 21 nt, Artificial Sequence
  Sythetic
guucgagaguuuggggucgug

SEQ ID NO: 8192 - RNA, 22 nt, Artificial Sequence
  Sythetic
aguucgagaguuuggggucgug

SEQ ID NO: 8193 - RNA, 23 nt, Artificial Sequence
  Sythetic
caguucgagaguuuggggucgug

SEQ ID NO: 8194 - RNA, 24 nt, Artificial Sequence
  Sythetic
gcaguucgagaguuuggggucgug

SEQ ID NO: 8195 - RNA, 18 nt, Artificial Sequence
  Sythetic
aggagcggguacggggug

SEQ ID NO: 8196 - RNA, 19 nt, Artificial Sequence
  Sythetic
uaggagcggguacggggug

SEQ ID NO: 8197 - RNA, 20 nt, Artificial Sequence
  Sythetic
auaggagcggguacggggug

SEQ ID NO: 8198 - RNA, 21 nt, Artificial Sequence
  Sythetic
gauaggagcggguacggggug

SEQ ID NO: 8199 - RNA, 22 nt, Artificial Sequence
  Sythetic
ggauaggagcggguacggggug

SEQ ID NO: 8200 - RNA, 23 nt, Artificial Sequence
  Sythetic
gggauaggagcggguacggggug

SEQ ID NO: 8201 - RNA, 24 nt, Artificial Sequence
  Sythetic
ggggauaggagcggguacggggug

SEQ ID NO: 8202 - RNA, 18 nt, Artificial Sequence
  Sythetic
ccgcgcgcuuuggguuug

SEQ ID NO: 8203 - RNA, 19 nt, Artificial Sequence
  Sythetic
cccgcgcgcuuuggguuug

SEQ ID NO: 8204 - RNA, 20 nt, Artificial Sequence
  Sythetic
gcccgcgcgcuuuggguuug

SEQ ID NO: 8205 - RNA, 21 nt, Artificial Sequence
  Sythetic
cgcccgcgcgcuuuggguuug

SEQ ID NO: 8206 - RNA, 22 nt, Artificial Sequence
  Sythetic
ccgcccgcgcgcuuuggguuug

SEQ ID NO: 8207 - RNA, 23 nt, Artificial Sequence
  Sythetic
uccgcccgcgcgcuuuggguuug

SEQ ID NO: 8208 - RNA, 24 nt, Artificial Sequence
  Sythetic
auccgcccgcgcgcuuuggguuug

SEQ ID NO: 8209 - RNA, 18 nt, Artificial Sequence
  Sythetic
gggucaggugcagauaau

SEQ ID NO: 8210 - RNA, 19 nt, Artificial Sequence
  Sythetic
agggucaggugcagauaau

SEQ ID NO: 8211 - RNA, 20 nt, Artificial Sequence
  Sythetic
uagggucaggugcagauaau

SEQ ID NO: 8212 - RNA, 21 nt, Artificial Sequence
  Sythetic
cuagggucaggugcagauaau

SEQ ID NO: 8213 - RNA, 22 nt, Artificial Sequence
  Sythetic
acuagggucaggugcagauaau

SEQ ID NO: 8214 - RNA, 23 nt, Artificial Sequence
  Sythetic
cacuagggucaggugcagauaau

SEQ ID NO: 8215 - RNA, 24 nt, Artificial Sequence
  Sythetic
ucacuagggucaggugcagauaau

SEQ ID NO: 8216 - RNA, 18 nt, Artificial Sequence
  Sythetic
accagacaaggcccgcau

SEQ ID NO: 8217 - RNA, 19 nt, Artificial Sequence
  Sythetic
aaccagacaaggcccgcau

SEQ ID NO: 8218 - RNA, 20 nt, Artificial Sequence
  Sythetic
gaaccagacaaggcccgcau

SEQ ID NO: 8219 - RNA, 21 nt, Artificial Sequence
  Sythetic
ugaaccagacaaggcccgcau

SEQ ID NO: 8220 - RNA, 22 nt, Artificial Sequence
  Sythetic
gugaaccagacaaggcccgcau

SEQ ID NO: 8221 - RNA, 23 nt, Artificial Sequence
  Sythetic
cgugaaccagacaaggcccgcau

SEQ ID NO: 8222 - RNA, 24 nt, Artificial Sequence
  Sythetic
gcgugaaccagacaaggcccgcau

SEQ ID NO: 8223 - RNA, 18 nt, Artificial Sequence
  Sythetic
gauuugcgcuccggggau

SEQ ID NO: 8224 - RNA, 19 nt, Artificial Sequence
  Sythetic
agauuugcgcuccggggau

SEQ ID NO: 8225 - RNA, 20 nt, Artificial Sequence
  Sythetic
gagauuugcgcuccggggau

SEQ ID NO: 8226 - RNA, 21 nt, Artificial Sequence
  Sythetic
ugagauuugcgcuccggggau

SEQ ID NO: 8227 - RNA, 22 nt, Artificial Sequence
  Sythetic
cugagauuugcgcuccggggau

SEQ ID NO: 8228 - RNA, 23 nt, Artificial Sequence
  Sythetic
ccugagauuugcgcuccggggau

SEQ ID NO: 8229 - RNA, 24 nt, Artificial Sequence
  Sythetic
cccugagauuugcgcuccggggau

SEQ ID NO: 8230 - RNA, 18 nt, Artificial Sequence
  Sythetic
auugcgcccgcuuuaacu

SEQ ID NO: 8231 - RNA, 19 nt, Artificial Sequence
  Sythetic
gauugcgcccgcuuuaacu

SEQ ID NO: 8232 - RNA, 20 nt, Artificial Sequence
  Sythetic
agauugcgcccgcuuuaacu

SEQ ID NO: 8233 - RNA, 21 nt, Artificial Sequence
  Sythetic
gagauugcgcccgcuuuaacu

SEQ ID NO: 8234 - RNA, 22 nt, Artificial Sequence
  Sythetic
ggagauugcgcccgcuuuaacu

SEQ ID NO: 8235 - RNA, 23 nt, Artificial Sequence
  Sythetic
aggagauugcgcccgcuuuaacu

SEQ ID NO: 8236 - RNA, 24 nt, Artificial Sequence
  Sythetic
gaggagauugcgcccgcuuuaacu

SEQ ID NO: 8237 - RNA, 18 nt, Artificial Sequence
  Sythetic
uuuuuguaacagaucacu

SEQ ID NO: 8238 - RNA, 19 nt, Artificial Sequence
  Sythetic
cuuuuuguaacagaucacu

SEQ ID NO: 8239 - RNA, 20 nt, Artificial Sequence
  Sythetic
acuuuuuguaacagaucacu

SEQ ID NO: 8240 - RNA, 21 nt, Artificial Sequence
  Sythetic
uacuuuuuguaacagaucacu

SEQ ID NO: 8241 - RNA, 22 nt, Artificial Sequence
  Sythetic
guacuuuuuguaacagaucacu

SEQ ID NO: 8242 - RNA, 23 nt, Artificial Sequence
  Sythetic
aguacuuuuuguaacagaucacu

SEQ ID NO: 8243 - RNA, 24 nt, Artificial Sequence
  Sythetic
caguacuuuuuguaacagaucacu

SEQ ID NO: 8244 - RNA, 18 nt, Artificial Sequence
  Sythetic
acccaccgcgccgauccu

SEQ ID NO: 8245 - RNA, 19 nt, Artificial Sequence
  Sythetic
gacccaccgcgccgauccu

SEQ ID NO: 8246 - RNA, 20 nt, Artificial Sequence
  Sythetic
ggacccaccgcgccgauccu

SEQ ID NO: 8247 - RNA, 21 nt, Artificial Sequence
  Sythetic
uggacccaccgcgccgauccu

SEQ ID NO: 8248 - RNA, 22 nt, Artificial Sequence
  Sythetic
guggacccaccgcgccgauccu

SEQ ID NO: 8249 - RNA, 23 nt, Artificial Sequence
  Sythetic
gguggacccaccgcgccgauccu

SEQ ID NO: 8250 - RNA, 24 nt, Artificial Sequence
  Sythetic
ggguggacccaccgcgccgauccu

SEQ ID NO: 8251 - RNA, 18 nt, Artificial Sequence
  Sythetic
agcccugagauuugcgcu

SEQ ID NO: 8252 - RNA, 19 nt, Artificial Sequence
  Sythetic
cagcccugagauuugcgcu

SEQ ID NO: 8253 - RNA, 20 nt, Artificial Sequence
  Sythetic
ccagcccugagauuugcgcu

SEQ ID NO: 8254 - RNA, 21 nt, Artificial Sequence
  Sythetic
gccagcccugagauuugcgcu

SEQ ID NO: 8255 - RNA, 22 nt, Artificial Sequence
  Sythetic
ugccagcccugagauuugcgcu

SEQ ID NO: 8256 - RNA, 23 nt, Artificial Sequence
  Sythetic
cugccagcccugagauuugcgcu

SEQ ID NO: 8257 - RNA, 24 nt, Artificial Sequence
  Sythetic
gcugccagcccugagauuugcgcu

SEQ ID NO: 8258 - RNA, 18 nt, Artificial Sequence
  Sythetic
ccaccgcgccgauccucu

SEQ ID NO: 8259 - RNA, 19 nt, Artificial Sequence
  Sythetic
cccaccgcgccgauccucu

SEQ ID NO: 8260 - RNA, 20 nt, Artificial Sequence
  Sythetic
acccaccgcgccgauccucu

SEQ ID NO: 8261 - RNA, 21 nt, Artificial Sequence
  Sythetic
gacccaccgcgccgauccucu

SEQ ID NO: 8262 - RNA, 22 nt, Artificial Sequence
  Sythetic
ggacccaccgcgccgauccucu

SEQ ID NO: 8263 - RNA, 23 nt, Artificial Sequence
  Sythetic
uggacccaccgcgccgauccucu

SEQ ID NO: 8264 - RNA, 24 nt, Artificial Sequence
  Sythetic
guggacccaccgcgccgauccucu

SEQ ID NO: 8265 - RNA, 18 nt, Artificial Sequence
  Sythetic
gcgaguggguccugcagu

SEQ ID NO: 8266 - RNA, 19 nt, Artificial Sequence
  Sythetic
cgcgaguggguccugcagu

SEQ ID NO: 8267 - RNA, 20 nt, Artificial Sequence
  Sythetic
ccgcgaguggguccugcagu

SEQ ID NO: 8268 - RNA, 21 nt, Artificial Sequence
  Sythetic
gccgcgaguggguccugcagu

SEQ ID NO: 8269 - RNA, 22 nt, Artificial Sequence
  Sythetic
ggccgcgaguggguccugcagu

SEQ ID NO: 8270 - RNA, 23 nt, Artificial Sequence
  Sythetic
cggccgcgaguggguccugcagu

SEQ ID NO: 8271 - RNA, 24 nt, Artificial Sequence
  Sythetic
acggccgcgaguggguccugcagu

SEQ ID NO: 8272 - RNA, 18 nt, Artificial Sequence
  Sythetic
guccugcaguucgagagu

SEQ ID NO: 8273 - RNA, 19 nt, Artificial Sequence
  Sythetic
gguccugcaguucgagagu

SEQ ID NO: 8274 - RNA, 20 nt, Artificial Sequence
  Sythetic
ggguccugcaguucgagagu

SEQ ID NO: 8275 - RNA, 21 nt, Artificial Sequence
  Sythetic
uggguccugcaguucgagagu

SEQ ID NO: 8276 - RNA, 22 nt, Artificial Sequence
  Sythetic
guggguccugcaguucgagagu

SEQ ID NO: 8277 - RNA, 23 nt, Artificial Sequence
  Sythetic
aguggguccugcaguucgagagu

SEQ ID NO: 8278 - RNA, 24 nt, Artificial Sequence
  Sythetic
gaguggguccugcaguucgagagu

SEQ ID NO: 8279 - RNA, 18 nt, Artificial Sequence
  Sythetic
ggaaaaccuucccgccgu

SEQ ID NO: 8280 - RNA, 19 nt, Artificial Sequence
  Sythetic
gggaaaaccuucccgccgu

SEQ ID NO: 8281 - RNA, 20 nt, Artificial Sequence
  Sythetic
ggggaaaaccuucccgccgu

SEQ ID NO: 8282 - RNA, 21 nt, Artificial Sequence
  Sythetic
gggggaaaaccuucccgccgu

SEQ ID NO: 8283 - RNA, 22 nt, Artificial Sequence
  Sythetic
agggggaaaaccuucccgccgu

SEQ ID NO: 8284 - RNA, 23 nt, Artificial Sequence
  Sythetic
gagggggaaaaccuucccgccgu

SEQ ID NO: 8285 - RNA, 24 nt, Artificial Sequence
  Sythetic
ugagggggaaaaccuucccgccgu

SEQ ID NO: 8286 - RNA, 18 nt, Artificial Sequence
  Sythetic
acgcacuguucuaggcgu

SEQ ID NO: 8287 - RNA, 19 nt, Artificial Sequence
  Sythetic
cacgcacuguucuaggcgu

SEQ ID NO: 8288 - RNA, 20 nt, Artificial Sequence
  Sythetic
ccacgcacuguucuaggcgu

SEQ ID NO: 8289 - RNA, 21 nt, Artificial Sequence
  Sythetic
gccacgcacuguucuaggcgu

SEQ ID NO: 8290 - RNA, 22 nt, Artificial Sequence
  Sythetic
ugccacgcacuguucuaggcgu

SEQ ID NO: 8291 - RNA, 23 nt, Artificial Sequence
  Sythetic
gugccacgcacuguucuaggcgu

SEQ ID NO: 8292 - RNA, 24 nt, Artificial Sequence
  Sythetic
cgugccacgcacuguucuaggcgu

SEQ ID NO: 8293 - RNA, 18 nt, Artificial Sequence
  Sythetic
ccggggauaggagcgggu

SEQ ID NO: 8294 - RNA, 19 nt, Artificial Sequence
  Sythetic
uccggggauaggagcgggu

SEQ ID NO: 8295 - RNA, 20 nt, Artificial Sequence
  Sythetic
cuccggggauaggagcgggu

SEQ ID NO: 8296 - RNA, 21 nt, Artificial Sequence
  Sythetic
gcuccggggauaggagcgggu

SEQ ID NO: 8297 - RNA, 22 nt, Artificial Sequence
  Sythetic
cgcuccggggauaggagcgggu

SEQ ID NO: 8298 - RNA, 23 nt, Artificial Sequence
  Sythetic
gcgcuccggggauaggagcgggu

SEQ ID NO: 8299 - RNA, 24 nt, Artificial Sequence
  Sythetic
ugcgcuccggggauaggagcgggu

SEQ ID NO: 8300 - RNA, 18 nt, Artificial Sequence
  Sythetic
uaggagcggguacggggu

SEQ ID NO: 8301 - RNA, 19 nt, Artificial Sequence
  Sythetic
auaggagcggguacggggu

SEQ ID NO: 8302 - RNA, 20 nt, Artificial Sequence
  Sythetic
gauaggagcggguacggggu

SEQ ID NO: 8303 - RNA, 21 nt, Artificial Sequence
  Sythetic
ggauaggagcggguacggggu

SEQ ID NO: 8304 - RNA, 22 nt, Artificial Sequence
  Sythetic
gggauaggagcggguacggggu

SEQ ID NO: 8305 - RNA, 23 nt, Artificial Sequence
  Sythetic
ggggauaggagcggguacggggu

SEQ ID NO: 8306 - RNA, 24 nt, Artificial Sequence
  Sythetic
cggggauaggagcggguacggggu

SEQ ID NO: 8307 - RNA, 18 nt, Artificial Sequence
  Sythetic
cgcccgcgcgcuuugggu

SEQ ID NO: 8308 - RNA, 19 nt, Artificial Sequence
  Sythetic
ccgcccgcgcgcuuugggu

SEQ ID NO: 8309 - RNA, 20 nt, Artificial Sequence
  Sythetic
uccgcccgcgcgcuuugggu

SEQ ID NO: 8310 - RNA, 21 nt, Artificial Sequence
  Sythetic
auccgcccgcgcgcuuugggu

SEQ ID NO: 8311 - RNA, 22 nt, Artificial Sequence
  Sythetic
gauccgcccgcgcgcuuugggu

SEQ ID NO: 8312 - RNA, 23 nt, Artificial Sequence
  Sythetic
ugauccgcccgcgcgcuuugggu

SEQ ID NO: 8313 - RNA, 24 nt, Artificial Sequence
  Sythetic
uugauccgcccgcgcgcuuugggu

SEQ ID NO: 8314 - RNA, 18 nt, Artificial Sequence
  Sythetic
aguuacauugucugaauu

SEQ ID NO: 8315 - RNA, 19 nt, Artificial Sequence
  Sythetic
gaguuacauugucugaauu

SEQ ID NO: 8316 - RNA, 20 nt, Artificial Sequence
  Sythetic
cgaguuacauugucugaauu

SEQ ID NO: 8317 - RNA, 21 nt, Artificial Sequence
  Sythetic
gcgaguuacauugucugaauu

SEQ ID NO: 8318 - RNA, 22 nt, Artificial Sequence
  Sythetic
agcgaguuacauugucugaauu

SEQ ID NO: 8319 - RNA, 23 nt, Artificial Sequence
  Sythetic
gagcgaguuacauugucugaauu

SEQ ID NO: 8320 - RNA, 24 nt, Artificial Sequence
  Sythetic
ggagcgaguuacauugucugaauu

SEQ ID NO: 8321 - RNA, 18 nt, Artificial Sequence
  Sythetic
guaggauuuggcauaauu

SEQ ID NO: 8322 - RNA, 19 nt, Artificial Sequence
  Sythetic
gguaggauuuggcauaauu

SEQ ID NO: 8323 - RNA, 20 nt, Artificial Sequence
  Sythetic
agguaggauuuggcauaauu

SEQ ID NO: 8324 - RNA, 21 nt, Artificial Sequence
  Sythetic
aagguaggauuuggcauaauu

SEQ ID NO: 8325 - RNA, 22 nt, Artificial Sequence
  Sythetic
gaagguaggauuuggcauaauu

SEQ ID NO: 8326 - RNA, 23 nt, Artificial Sequence
  Sythetic
agaagguaggauuuggcauaauu

SEQ ID NO: 8327 - RNA, 24 nt, Artificial Sequence
  Sythetic
aagaagguaggauuuggcauaauu

SEQ ID NO: 8328 - RNA, 18 nt, Artificial Sequence
  Sythetic
ggucaggugcagauaauu

SEQ ID NO: 8329 - RNA, 19 nt, Artificial Sequence
  Sythetic
gggucaggugcagauaauu

SEQ ID NO: 8330 - RNA, 20 nt, Artificial Sequence
  Sythetic
agggucaggugcagauaauu

SEQ ID NO: 8331 - RNA, 21 nt, Artificial Sequence
  Sythetic
uagggucaggugcagauaauu

SEQ ID NO: 8332 - RNA, 22 nt, Artificial Sequence
  Sythetic
cuagggucaggugcagauaauu

SEQ ID NO: 8333 - RNA, 23 nt, Artificial Sequence
  Sythetic
acuagggucaggugcagauaauu

SEQ ID NO: 8334 - RNA, 24 nt, Artificial Sequence
  Sythetic
cacuagggucaggugcagauaauu

SEQ ID NO: 8335 - RNA, 18 nt, Artificial Sequence
  Sythetic
ccagacaaggcccgcauu

SEQ ID NO: 8336 - RNA, 19 nt, Artificial Sequence
  Sythetic
accagacaaggcccgcauu

SEQ ID NO: 8337 - RNA, 20 nt, Artificial Sequence
  Sythetic
aaccagacaaggcccgcauu

SEQ ID NO: 8338 - RNA, 21 nt, Artificial Sequence
  Sythetic
gaaccagacaaggcccgcauu

SEQ ID NO: 8339 - RNA, 22 nt, Artificial Sequence
  Sythetic
ugaaccagacaaggcccgcauu

SEQ ID NO: 8340 - RNA, 23 nt, Artificial Sequence
  Sythetic
gugaaccagacaaggcccgcauu

SEQ ID NO: 8341 - RNA, 24 nt, Artificial Sequence
  Sythetic
cgugaaccagacaaggcccgcauu

SEQ ID NO: 8342 - RNA, 18 nt, Artificial Sequence
  Sythetic
auaauuaggagauacuuu

SEQ ID NO: 8343 - RNA, 19 nt, Artificial Sequence
  Sythetic
gauaauuaggagauacuuu

SEQ ID NO: 8344 - RNA, 20 nt, Artificial Sequence
  Sythetic
agauaauuaggagauacuuu

SEQ ID NO: 8345 - RNA, 21 nt, Artificial Sequence
  Sythetic
cagauaauuaggagauacuuu

SEQ ID NO: 8346 - RNA, 22 nt, Artificial Sequence
  Sythetic
gcagauaauuaggagauacuuu

SEQ ID NO: 8347 - RNA, 23 nt, Artificial Sequence
  Sythetic
ugcagauaauuaggagauacuuu

SEQ ID NO: 8348 - RNA, 24 nt, Artificial Sequence
  Sythetic
gugcagauaauuaggagauacuuu

SEQ ID NO: 8349 - RNA, 18 nt, Artificial Sequence
  Sythetic
cccgcgcgcuuuggguuu

SEQ ID NO: 8350 - RNA, 19 nt, Artificial Sequence
  Sythetic
gcccgcgcgcuuuggguuu

SEQ ID NO: 8351 - RNA, 20 nt, Artificial Sequence
  Sythetic
cgcccgcgcgcuuuggguuu

SEQ ID NO: 8352 - RNA, 21 nt, Artificial Sequence
  Sythetic
ccgcccgcgcgcuuuggguuu

SEQ ID NO: 8353 - RNA, 22 nt, Artificial Sequence
  Sythetic
uccgcccgcgcgcuuuggguuu

SEQ ID NO: 8354 - RNA, 23 nt, Artificial Sequence
  Sythetic
auccgcccgcgcgcuuuggguuu

SEQ ID NO: 8355 - RNA, 24 nt, Artificial Sequence
  Sythetic
gauccgcccgcgcgcuuuggguuu

SEQ ID NO: 8356 - RNA, 17 nt, Artificial Sequence
  Sythetic
accugucuucaggcgca

SEQ ID NO: 8357 - RNA, 17 nt, Artificial Sequence
  Sythetic
guguaaguccaguuuca

SEQ ID NO: 8358 - RNA, 17 nt, Artificial Sequence
  Sythetic
uccucgacucacagaga

SEQ ID NO: 8359 - RNA, 17 nt, Artificial Sequence
  Sythetic
gcaaacagcaggguccc

SEQ ID NO: 8360 - RNA, 17 nt, Artificial Sequence
  Sythetic
gcuuccaacgccauucc

SEQ ID NO: 8361 - RNA, 17 nt, Artificial Sequence
  Sythetic
agagacgcguuccuagc

SEQ ID NO: 8362 - RNA, 17 nt, Artificial Sequence
  Sythetic
ugagucccgccgcgcgc

SEQ ID NO: 8363 - RNA, 17 nt, Artificial Sequence
  Sythetic
caaugcuggaaguaggg

SEQ ID NO: 8364 - RNA, 17 nt, Artificial Sequence
  Sythetic
ggcggggcggagaggug

SEQ ID NO: 8365 - RNA, 17 nt, Artificial Sequence
  Sythetic
gguaccuccaauguccu

SEQ ID NO: 8366 - RNA, 17 nt, Artificial Sequence
  Sythetic
gcgcggggaauggcguu

SEQ ID NO: 8367 - RNA, 20 nt, Artificial Sequence
  Sythetic
cccaccugucuucaggcgca

SEQ ID NO: 8368 - RNA, 20 nt, Artificial Sequence
  Sythetic
ucaguguaaguccaguuuca

SEQ ID NO: 8369 - RNA, 20 nt, Artificial Sequence
  Sythetic
uucuccucgacucacagaga

SEQ ID NO: 8370 - RNA, 20 nt, Artificial Sequence
  Sythetic
cccgcaaacagcaggguccc

SEQ ID NO: 8371 - RNA, 20 nt, Artificial Sequence
  Sythetic
caagcuuccaacgccauucc

SEQ ID NO: 8372 - RNA, 20 nt, Artificial Sequence
  Sythetic
cagagagacgcguuccuagc

SEQ ID NO: 8373 - RNA, 20 nt, Artificial Sequence
  Sythetic
ccuugagucccgccgcgcgc

SEQ ID NO: 8374 - RNA, 20 nt, Artificial Sequence
  Sythetic
cggcaaugcuggaaguaggg

SEQ ID NO: 8375 - RNA, 20 nt, Artificial Sequence
  Sythetic
aggggcggggcggagaggug

SEQ ID NO: 8376 - RNA, 20 nt, Artificial Sequence
  Sythetic
acggguaccuccaauguccu

SEQ ID NO: 8377 - RNA, 20 nt, Artificial Sequence
  Sythetic
aaagcgcggggaauggcguu

SEQ ID NO: 8378 - RNA, 17 nt, Artificial Sequence
  Sythetic
gggugggugggggggga

SEQ ID NO: 8379 - RNA, 20 nt, Artificial Sequence
  Sythetic
ugcgggugggugggggggga

SEQ ID NO: 8380 - RNA, 17 nt, Artificial Sequence
  Sythetic
gcuuuauuauccuaaaa

SEQ ID NO: 8381 - RNA, 17 nt, Artificial Sequence
  Sythetic
gguaaccaauucgcgaa

SEQ ID NO: 8382 - RNA, 17 nt, Artificial Sequence
  Sythetic
ugucaagaacagucacc

SEQ ID NO: 8383 - RNA, 17 nt, Artificial Sequence
  Sythetic
uaggaguugauccgccc

SEQ ID NO: 8384 - RNA, 17 nt, Artificial Sequence
  Sythetic
ccgcgcagcugccagcc

SEQ ID NO: 8385 - RNA, 17 nt, Artificial Sequence
  Sythetic
ucccaggaggagauugc

SEQ ID NO: 8386 - RNA, 17 nt, Artificial Sequence
  Sythetic
ugggcagggauuccaag

SEQ ID NO: 8387 - RNA, 17 nt, Artificial Sequence
  Sythetic
gaagaccuggguucaag

SEQ ID NO: 8388 - RNA, 17 nt, Artificial Sequence
  Sythetic
gauacuuucagaagaag

SEQ ID NO: 8389 - RNA, 17 nt, Artificial Sequence
  Sythetic
gcggccguggggaagag

SEQ ID NO: 8390 - RNA, 17 nt, Artificial Sequence
  Sythetic
ugggcugaguucccagg

SEQ ID NO: 8391 - RNA, 17 nt, Artificial Sequence
  Sythetic
gaaaugccagggauggg

SEQ ID NO: 8392 - RNA, 17 nt, Artificial Sequence
  Sythetic
guguugugagaaugaau

SEQ ID NO: 8393 - RNA, 17 nt, Artificial Sequence
  Sythetic
ccuggcauuucaucucu

SEQ ID NO: 8394 - RNA, 20 nt, Artificial Sequence
  Sythetic
agugcuuuauuauccuaaaa

SEQ ID NO: 8395 - RNA, 20 nt, Artificial Sequence
  Sythetic
agcgguaaccaauucgcgaa

SEQ ID NO: 8396 - RNA, 20 nt, Artificial Sequence
  Sythetic
cagugucaagaacagucacc

SEQ ID NO: 8397 - RNA, 20 nt, Artificial Sequence
  Sythetic
agcuaggaguugauccgccc

SEQ ID NO: 8398 - RNA, 20 nt, Artificial Sequence
  Sythetic
acaccgcgcagcugccagcc

SEQ ID NO: 8399 - RNA, 20 nt, Artificial Sequence
  Sythetic
aguucccaggaggagauugc

SEQ ID NO: 8400 - RNA, 20 nt, Artificial Sequence
  Sythetic
ggaugggcagggauuccaag

SEQ ID NO: 8401 - RNA, 20 nt, Artificial Sequence
  Sythetic
accgaagaccuggguucaag

SEQ ID NO: 8402 - RNA, 20 nt, Artificial Sequence
  Sythetic
ggagauacuuucagaagaag

SEQ ID NO: 8403 - RNA, 20 nt, Artificial Sequence
  Sythetic
cucgcggccguggggaagag

SEQ ID NO: 8404 - RNA, 20 nt, Artificial Sequence
  Sythetic
gccugggcugaguucccagg

SEQ ID NO: 8405 - RNA, 20 nt, Artificial Sequence
  Sythetic
gaugaaaugccagggauggg

SEQ ID NO: 8406 - RNA, 20 nt, Artificial Sequence
  Sythetic
acgguguugugagaaugaau

SEQ ID NO: 8407 - RNA, 20 nt, Artificial Sequence
  Sythetic
aucccuggcauuucaucucu

SEQ ID NO: 8408 - DNA, 8 bp, Artificial Sequence
  Synthetic
  misc_feature (1)..(4): n is a, c, g, or t
nnnngatt

SEQ ID NO: 8409 - DNA, 7 bp, Artificial Sequence
  Synthetic
  misc_feature (1)..(3): n is a, c, g, or t
nnngctt

SEQ ID NO: 8410 - DNA, 30 bp, Artificial Sequence
  Synthetic
tatcaagtgtcaagtccaatctatgacatc

SEQ ID NO: 8411 - DNA, 29 bp, Artificial Sequence
  Synthetic
ggaaattcttccagaattgatactgactg

SEQ ID NO: 8412 - protein, 36 aa, Artificial Sequence
  Synthetic
YTSLIHSLIEESQNQQEKNEQELLELDKWASLWNWF

SEQ ID NO: 8413 - protein, 36 aa, Artificial Sequence
  Synthetic
SGIVQQQNNLLRAIEAQQHLLQLTVWGIKQLQARIL

SEQ ID NO: 8414 - protein, 34 aa, Artificial Sequence
  Synthetic
WMEWDREINNYTSLIHSLIEESQNQQEKNEQELL

SEQ ID NO: 8415 - protein, 25 aa, Artificial Sequence
  Synthetic
YTSLIHSLIEESQNQQEKNEQELLE

SEQ ID NO: 8416 - protein, 39 aa, Artificial Sequence
  Synthetic
WQEWEQKITALLEQAQIQQEKNEYELQKLDKWASLWEWF

What is claimed is:

1. A genome editing system comprising a first gRNA molecule comprising a first targeting domain that is complementary with a target sequence of a CCR5 gene and a second gRNA molecule comprising a second targeting domain that is complementary with a target sequence of a CXCR4 gene.

2. The genome editing system of claim 1, wherein the first targeting domain and the second targeting domain are selected from the group consisting of:
(a) a first targeting domain comprising a nucleotide sequence selected from SEQ ID NOS: 476 to 1569 and 1947 to 3663, and a second targeting domain comprising a nucleotide sequence selected from SEQ ID NOS: 4064 to 5208, and 5921 to 8355;
(b) a first targeting domain comprising a nucleotide sequence selected from SEQ ID NOS: 208 to 475, and 1614 to 1946, and a second targeting domain comprising a nucleotide sequence selected from SEQ ID NOS: 3740 to 4063, and 5241 to 5920;
(c) a first targeting domain comprising a nucleotide sequence selected from SEQ ID NOS: 476 to 1569 and 1947 to 3663, and a second targeting domain comprising a nucleotide sequence selected from SEQ ID NOS: 3740 to 4063, and 5241 to 5920;
(d) a first targeting domain comprising a nucleotide sequence selected from SEQ ID NOS: 208 to 475, and 1614 to 1946, and a second targeting domain comprising a nucleotide sequence selected from SEQ ID NOS: 4064 to 5208, and 5921 to 8355; and
(e) a first targeting domain comprising a nucleotide sequence selected from SEQ ID NOS: 335, 480, 482, 486, 488, 490, 492, 512, 521, 535, 1000, and 1002, and a second targeting domain comprising a nucleotide sequence selected from SEQ ID NO: 3973, 4118, and 4604.

3. The genome editing system of claim 1, wherein the first targeting domain and the second targeting domain are selected from the group consisting of:
(a) a first targeting domain comprising the nucleotide sequence set forth in SEQ ID NO: 335, and a second targeting domain comprising the nucleotide sequence set forth in SEQ ID NO: 3973;
(b) a first targeting domain comprising the nucleotide sequence set forth in SEQ ID NO: 335, and a second targeting domain comprising the nucleotide sequence set forth in SEQ ID NO: 4604;
(c) a first targeting domain comprising the nucleotide sequence set forth in SEQ ID NO: 488, and a second targeting domain comprising the nucleotide sequence set forth in SEQ ID NO: 4604; and
(d) a first targeting domain comprising the nucleotide sequence set forth in SEQ ID NO: 480, and a second targeting domain comprising the nucleotide sequence set forth in SEQ ID NO: 4118.

4. The genome editing system of claim 1, wherein one or both of the first and second gRNA molecules are modified at its 5′ end.

5. The genome editing system of claim 4, wherein the modification comprises an inclusion of a 5′ cap.

6. The genome editing system of claim 5, wherein the 5′ cap comprises a 3 ‘-O-Me-m7G(5′)ppp(5′)G anti reverse cap analog (ARCA).

7. The genome editing system of claim 1, wherein one or both of the first and second gRNA molecules comprise a 3’ polyA tail that is comprised of about 10 to about 30 adenine nucleotides.

8. The genome editing system of claim 7, wherein the 3′ polyA tail is comprised of 20 adenine nucleotides.

9. The genome editing system of claim 1, further comprising a first Cas9 molecule and a second Cas9 molecule that are configured to form complexes with the first and second gRNAs.

10. The genome editing system of claim 9, wherein at least one of the first and second Cas9 molecules comprises an S. pyogenes Cas9 molecule or an S. aureus Cas9 molecule.

11. The genome editing system of claim 9, wherein at least one of the first and second Cas9 molecules comprises a wild-type Cas9 molecule, a mutant Cas9 molecule, or a combination thereof.

12. The genome editing system of claim 11, wherein the mutant Cas9 molecule comprises a D10A mutation.

13. The genome editing system of claim 1, further comprising an oligonucleotide donor encoding a de132 mutation in the CCR5 gene.

14. A genome editing system comprising a gRNA molecule comprising a targeting domain that is complementary with a target sequence of a CCR5 gene.

15. The genome editing system of claim 14, wherein the targeting domain comprises a nucleotide sequence selected from SEQ ID NOS: 476 to 1569 and 1947 to 3663.

16. The genome editing system of claim 14, wherein the targeting domain comprises a nucleotide sequence selected from SEQ ID NOS: 208 to 475, and 1614 to 1946.

17. The genome editing system of claim 14, wherein the targeting domain comprises a nucleotide sequence selected from SEQ ID NOS: 335, 480, 482, 486, 488, 490, 492, 512, 521,535, 1000, and 1002.

18. A genome editing system comprising a gRNA molecule comprising a targeting domain that is complementary with a target sequence of a CXCR4 gene.

19. The genome editing system of claim 18, wherein the targeting domain comprises a nucleotide sequence selected from SEQ ID NOS: 4064 to 5208, and 5921 to 8355.

20. The genome editing system of claim 18, wherein the targeting domain comprises a nucleotide sequence selected from SEQ ID NOS: 3740 to 4063, and 5241 to 5920.

21. The genome editing system of claim 18, wherein the targeting domain comprises a nucleotide sequence selected from SEQ ID NOS: 3973, 4118, and 4604.

22. A composition comprising a first gRNA molecule comprising a first targeting domain that is complementary with a target sequence of a CCR5 gene, and a second gRNA molecule comprising a second targeting domain that is complementary with a target sequence of a CXCR4 gene.

23. A composition comprising a gRNA molecule comprising a targeting domain that is complementary with a target sequence of a CCR5 gene.

24. A composition comprising a gRNA molecule comprising a targeting domain that is complementary with a target sequence of a CXCR4 gene.

25. A vector comprising a polynucleotide encoding one gRNA molecule comprising a targeting domain that is complementary with a target sequence of a CCR5 gene.

26. A vector comprising a gRNA molecule comprising a targeting domain that is complementary with a target sequence of a CXCR4 gene.

27. A vector comprising a polynucleotide encoding at least one of a first gRNA molecule comprising a first targeting domain that is complementary with a target sequence of a CCR5 gene, and a second gRNA molecule comprising a second targeting domain that is complementary with a target sequence of a CXCR4 gene.

28. A method of altering a CCR5 gene in a cell, comprising administering to the cell one of:
(i) a genome editing system comprising a gRNA molecule comprising a targeting domain that is complementary with a target sequence of a CCR5 gene, and at least a Cas9 molecule;
(ii) a genome editing system comprising a polynucleotide encoding one gRNA molecule comprising a targeting domain that is complementary with a target sequence of a CCR5 gene, and a polynucleotide encoding a Cas9 molecule; and
(iii) a composition comprising one gRNA molecule comprising a targeting domain that that is complementary with a target sequence of a CCR5 gene, and at least a Cas9 molecule.

29. A method of altering a CXCR4 gene in a cell, comprising administering to the cell one of:
(i) a genome editing system comprising one gRNA molecule comprising a targeting domain that is complementary with a target sequence of a CXCR4 gene, and at least a Cas9 molecule;
(ii) a genome editing system comprising a polynucleotide encoding one gRNA molecule comprising a targeting domain that is complementary with a target sequence of a CXCR4 gene, and a polynucleotide encoding a Cas9 molecule; and
(iii) a composition comprising one gRNA molecule comprising a targeting domain that is complementary with a target sequence of a CXCR4 gene, and at least a Cas9 molecule.

30. A method of altering a CCR5 gene and a CXCR4 gene in a cell, comprising administering to the cell one of:
(i) a genome editing system comprising a first gRNA molecule comprising a first targeting domain that is complementary with a target sequence of a CCR5 gene, a second gRNA molecule comprising a second targeting domain that is complementary with a target sequence of a CXCR4 gene, and at least a Cas9 molecule;
(ii) a genome editing system comprising a polynucleotide encoding a first gRNA molecule comprising a first targeting domain that is complementary with a target sequence of a CCR5 gene, a polynucleotide encoding a second gRNA molecule comprising a second targeting domain that is complementary with a target sequence of a CXCR4 gene, and a polynucleotide encoding a Cas9 molecule; and
(iii) a composition comprising a first gRNA molecule comprising a first targeting domain that is complementary with a target sequence of a CCR5 gene, a second gRNA molecule comprising a second targeting domain that is complementary with a target sequence of a CXCR4 gene, and at least a Cas9 molecule.

31. A method of treating or preventing HIV infection or AIDS in a subject, comprising administering to the subject one of:
(i) a genome editing system comprising one gRNA molecule comprising a targeting domain that is complementary with a target sequence of a CCR5 gene, and at least a Cas9 molecule;
(ii) a genome editing system comprising a polynucleotide encoding one gRNA molecule comprising a targeting domain that is complementary with a target sequence of a CCR5 gene, and a polynucleotide encoding a Cas9 molecule;
(iii) a composition comprising one gRNA molecule comprising a targeting that is complementary with a target sequence of a CCR5 gene, and at least a Cas9 molecule;
(iv) a genome editing system comprising one gRNA molecule comprising a targeting domain that is complementary with a target sequence of a CXCR4 gene, and at least a Cas9 molecule;
(v) a genome editing system comprising a polynucleotide encoding one gRNA molecule comprising a targeting domain that is complementary with a target sequence of a CXCR4 gene, and a polynucleotide encoding a Cas9 molecule;
(vi) a composition comprising one gRNA molecule comprising a targeting domain that is complementary with a target sequence of a CXCR4 gene, and at least a Cas9 molecule;
(vii) a genome editing system comprising a first gRNA molecule comprising a first targeting domain that is complementary with a target sequence of a CCR5 gene, a second gRNA molecule comprising a second targeting domain that is complementary with a target sequence of a CXCR4 gene, and at least a Cas9 molecule;
(viii) a genome editing system comprising a polynucleotide encoding a first gRNA molecule comprising a first targeting domain that is complementary with a target sequence of a CCR5 gene, a polynucleotide encoding a second gRNA molecule comprising a second targeting domain that is complementary with a target sequence of a CXCR4 gene, and a polynucleotide encoding a Cas9 molecule; and
(ix) a composition comprising a first gRNA molecule comprising a first targeting domain that is complementary with a target sequence of a CCR5 gene, a second gRNA molecule comprising a second targeting domain that is complementary with a target sequence of a CXCR4 gene, and at least a Cas9 molecule.

32. A method of preparing a cell for transplantation, comprising contacting the cell with one of:
(i) a genome editing system comprising one gRNA molecule comprising a targeting domain that is complementary with a target sequence of a CCR5 gene, and at least a Cas9 molecule;
(ii) a genome editing system comprising a polynucleotide encoding one gRNA molecule comprising a targeting domain that is complementary with a target sequence of a CCR5 gene, and a polynucleotide encoding a Cas9 molecule;
(iii) a composition comprising one gRNA molecule comprising a targeting that is complementary with a target sequence of a CCR5 gene, and at least a Cas9 molecule;
(iv) a genome editing system comprising one gRNA molecule comprising a targeting domain that is complementary with a target sequence of a CXCR4 gene, and at least a Cas9 molecule;
(v) a genome editing system comprising a polynucleotide encoding one gRNA molecule comprising a targeting domain that is complementary with a target sequence of a CXCR4 gene, and a polynucleotide encoding a Cas9 molecule;
(vi) a composition comprising one gRNA molecule comprising a targeting domain that is complementary with a target sequence of a CXCR4 gene, and at least a Cas9 molecule;
(vii) a genome editing system comprising a first gRNA molecule comprising a first targeting domain that is complementary with a target sequence of a CCR5 gene, a second gRNA molecule comprising a second targeting domain that is complementary with a target sequence of a CXCR4 gene, and at least a Cas9 molecule;
(viii) a genome editing system comprising a polynucleotide encoding a first gRNA molecule comprising a first targeting domain that is complementary with a target sequence of a CCR5 gene, a polynucleotide encoding a second gRNA molecule comprising a second targeting domain that is complementary with a target sequence of a CXCR4 gene, and a polynucleotide encoding a Cas9 molecule; and
(ix) a composition comprising a first gRNA molecule comprising a first targeting domain that is complementary with a target sequence of a CCR5 gene, a second gRNA molecule comprising a second targeting domain that is complementary with a target sequence of a CXCR4 gene, and at least a Cas9 molecule.

33. A cell comprising at least one edited allele of a CCR5 gene and at least one edited allele of a CXCR4 gene.

34. A composition, comprising a plurality of cells characterized by at least 4% editing of a CCR5 gene and 4% editing of a CXCR4 gene.
